United States Patent Application Publication US 2023/0087228 A1 - sequence listing, part 12

SEQ ID NO: 1036 - DNA, 106280 bp, Artificial Sequence
  Synthetic Oligonucleotide
  misc_feature (1)..(96189): n is a, c, g, or t
nnnnnnnnnnnnnnnnnnnnnnnnnnnnnnnnnnnnnnnnnnnnnnnnnnnnnnnnnnnnnnnnnnnnnnnnnnnnnnnnnnnnnnnnnnnnnnnnnnnnnnnnnnnnnnnnnnnnnnnnnnnnnnnnnnnnnnnnnnnnnnnnnnnnnnnnnnnnnnnnnnnnnnnnnnnnnnnnnnnnnnnnnnnnnnnnnnnnnnnnnnnnnnnnnnnnnnnnnnnnnnnnnnnnnnnnnnnnnnnnnnnnnnnnnnnnnnnnnnnnnnnnnnnnnnnnnnnnnnnnnnnnnnnnnnnnnnnnnnnnnnnnnnnnnnnnnnnnnnnnnnnnnnnnnnnnnnnnnnnnnnnnnnnnnnnnnnnnnnnnnnnnnnnnnnnnnnnnnnnnnnnnnnnnnnnnnnnnnnnnnnnnnnnnnnnnnnnnnnnnnnnnnnnnnnnnnnnnnnnnnnnnnnnnnnnnnnnnnnnnnnnnnnnnnnnnnnnnnnnnnnnnnnnnnnnnnnnnnnnnnnnnnnnnnnnnnnnnnnnnnnnnnnnnnnnnnnnnnnnnnnnnnnnnnnnnnnnnnnnnnnnnnnnnnnnnnnnnnnnnnnnnnnnnnnnnnnnnnnnnnnnnnnnnnnnnnnnnnnnnnnnnnnnnnnnnnnnnnnnnnnnnnnnnnnnnnnnnnnnnnnnnnnnnnnnnnnnnnnnnnnnnnnnnnnnnnnnnnnnnnnnnnnnnnnnnnnnnnnnnnnnnnnnnnnnnnnnnnnnnnnnnnnnnnnnnnnnnnnnnnnnnnnnnnnnnnnnnnnnnnnnnnnnnnnnnnnnnnnnnnnnnnnnnnnnnnnnnnnnnnnnnnnnnnnnnnnnnnnnnnnnnnnnnnnnnnnnnnnnnnnnnnnnnnnnnnnnnnnnnnnnnnnnnnnnnnnnnnnnnnnnnnnnnnnnnnnnnnnnnnnnnnnnnnnnnnnnnnnnnnnnnnnnnnnnnnnnnnnnnnnnnnnnnnnnnnnnnnnnnnnnnnnnnnnnnnnnnnnnnnnnnnnnnnnnnnnnnnnnnnnnnnnnnnnnnnnnnnnnnnnnnnnnnnnnnnnnnnnnnnnnnnnnnnnnnnnnnnnnnnnnnnnnnnnnnnnnnnnnnnnnnnnnnnnnnnnnnnnnnnnnnnnnnnnnnnnnnnnnnnnnnnnnnnnnnnnnnnnnnnnnnnnnnnnnnnnnnnnnnnnnnnnnnnnnnnnnnnnnnnnnnnnnnnnnnnnnnnnnnnnnnnnnnnnnnnnnnnnnnnnnnnnnnnnnnnnnnnnnnnnnnnnnnnnnnnnnnnnnnnnnnnnnnnnnnnnnnnnnnnnnnnnnnnnnnnnnnnnnnnnnnnnnnnnnnnnnnnnnnnnnnnnnnnnnnnnnnnnnnnnnnnnnnnnnnnnnnnnnnnnnnnnnnnnnnnnnnnnnnnnnnnnnnnnnnnnnnnnnnnnnnnnnnnnnnnnnnnnnnnnnnnnnnnnnnnnnnnnnnnnnnnnnnnnnnnnnnnnnnnnnnnnnnnnnnnnnnnnnnnnnnnnnnnnnnnnnnnnnnnnnnnnnnnnnnnnnnnnnnnnnnnnnnnnnnnnnnnnnnnnnnnnnnnnnnnnnnnnnnnnnnnnnnnnnnnnnnnnnnnnnnnnnnnnnnnnnnnnnnnnnnnnnnnnnnnnnnnnnnnnnnnnnnnnnnnnnnnnnnnnnnnnnnnnnnnnnnnnnnnnnnnnnnnnnnnnnnnnnnnnnnnnnnnnnnnnnnnnnnnnnnnnnnnnnnnnnnnnnnnnnnnnnnnnnnnnnnnnnnnnnnnnnnnnnnnnnnnnnnnnnnnnnnnnnnnnnnnnnnnnnnnnnnnnnnnnnnnnnnnnnnnnnnnnnnnnnnnnnnnnnnnnnnnnnnnnnnnnnnnnnnnnnnnnnnnnnnnnnnnnnnnnnnnnnnnnnnnnnnnnnnnnnnnnnnnnnnnnnnnnnnnnnnnnnnnnnnnnnnnnnnnnnnnnnnnnnnnnnnnnnnnnnnnnnnnnnnnnnnnnnnnnnnnnnnnnnnnnnnnnnnnnnnnnnnnnnnnnnnnnnnnnnnnnnnnnnnnnnnnnnnnnnnnnnnnnnnnnnnnnnnnnnnnnnnnnnnnnnnnnnnnnnnnnnnnnnnnnnnnnnnnnnnnnnnnnnnnnnnnnnnnnnnnnnnnnnnnnnnnnnnnnnnnnnnnnnnnnnnnnnnnnnnnnnnnnnnnnnnnnnnnnnnnnnnnnnnnnnnnnnnnnnnnnnnnnnnnnnnnnnnnnnnnnnnnnnnnnnnnnnnnnnnnnnnnnnnnnnnnnnnnnnnnnnnnnnnnnnnnnnnnnnnnnnnnnnnnnnnnnnnnnnnnnnnnnnnnnnnnnnnnnnnnnnnnnnnnnnnnnnnnnnnnnnnnnnnnnnnnnnnnnnnnnnnnnnnnnnnnnnnnnnnnnnnnnnnnnnnnnnnnnnnnnnnnnnnnnnnnnnnnnnnnnnnnnnnnnnnnnnnnnnnnnnnnnnnnnnnnnnnnnnnnnnnnnnnnnnnnnnnnnnnnnnnnnnnnnnnnnnnnnnnnnnnnnnnnnnnnnnnnnnnnnnnnnnnnnnnnnnnnnnnnnnnnnnnnnnnnnnnnnnnnnnnnnnnnnnnnnnnnnnnnnnnnnnnnnnnnnnnnnnnnnnnnnnnnnnnnnnnnnnnnnnnnnnnnnnnnnnnnnnnnnnnnnnnnnnnnnnnnnnnnnnnnnnnnnnnnnnnnnnnnnnnnnnnnnnnnnnnnnnnnnnnnnnnnnnnnnnnnnnnnnnnnnnnnnnnnnnnnnnnnnnnnnnnnnnnnnnnnnnnnnnnnnnnnnnnnnnnnnnnnnnnnnnnnnnnnnnnnnnnnnnnnnnnnnnnnnnnnnnnnnnnnnnnnnnnnnnnnnnnnnnnnnnnnnnnnnnnnnnnnnnnnnnnnnnnnnnnnnnnnnnnnnnnnnnnnnnnnnnnnnnnnnnnnnnnnnnnnnnnnnnnnnnnnnnnnnnnnnnnnnnnnnnnnnnnnnnnnnnnnnnnnnnnnnnnnnnnnnnnnnnnnnnnnnnnnnnnnnnnnnnnnnnnnnnnnnnnnnnnnnnnnnnnnnnnnnnnnnnnnnnnnnnnnnnnnnnnnnnnnnnnnnnnnnnnnnnnnnnnnnnnnnnnnnnnnnnnnnnnnnnnnnnnnnnnnnnnnnnnnnnnnnnnnnnnnnnnnnnnnnnnnnnnnnnnnnnnnnnnnnnnnnnnnnnnnnnnnnnnnnnnnnnnnnnnnnnnnnnnnnnnnnnnnnnnnnnnnnnnnnnnnnnnnnnnnnnnnnnnnnnnnnnnnnnnnnnnnnnnnnnnnnnnnnnnnnnnnnnnnnnnnnnnnnnnnnnnnnnnnnnnnnnnnnnnnnnnnnnnnnnnnnnnnnnnnnnnnnnnnnnnnnnnnnnnnnnnnnnnnnnnnnnnnnnnnnnnnnnnnnnnnnnnnnnnnnnnnnnnnnnnnnnnnnnnnnnnnnnnnnnnnnnnnnnnnnnnnnnnnnnnnnnnnnnnnnnnnnnnnnnnnnnnnnnnnnnnnnnnnnnnnnnnnnnnnnnnnnnnnnnnnnnnnnnnnnnnnnnnnnnnnnnnnnnnnnnnnnnnnnnnnnnnnnnnnnnnnnnnnnnnnnnnnnnnnnnnnnnnnnnnnnnnnnnnnnnnnnnnnnnnnnnnnnnnnnnnnnnnnnnnnnnnnnnnnnnnnnnnnnnnnnnnnnnnnnnnnnnnnnnnnnnnnnnnnnnnnnnnnnnnnnnnnnnnnnnnnnnnnnnnnnnnnnnnnnnnnnnnnnnnnnnnnnnnnnnnnnnnnnnnnnnnnnnnnnnnnnnnnnnnnnnnnnnnnnnnnnnnnnnnnnnnnnnnnnnnnnnnnnnnnnnnnnnnnnnnnnnnnnnnnnnnnnnnnnnnnnnnnnnnnnnnnnnnnnnnnnnnnnnnnnnnnnnnnnnnnnnnnnnnnnnnnnnnnnnnnnnnnnnnnnnnnnnnnnnnnnnnnnnnnnnnnnnnnnnnnnnnnnnnnnnnnnnnnnnnnnnnnnnnnnnnnnnnnnnnnnnnnnnnnnnnnnnnnnnnnnnnnnnnnnnnnnnnnnnnnnnnnnnnnnnnnnnnnnnnnnnnnnnnnnnnnnnnnnnnnnnnnnnnnnnnnnnnnnnnnnnnnnnnnnnnnnnnnnnnnnnnnnnnnnnnnnnnnnnnnnnnnnnnnnnnnnnnnnnnnnnnnnnnnnnnnnnnnnnnnnnnnnnnnnnnnnnnnnnnnnnnnnnnnnnnnnnnnnnnnnnnnnnnnnnnnnnnnnnnnnnnnnnnnnnnnnnnnnnnnnnnnnnnnnnnnnnnnnnnnnnnnnnnnnnnnnnnnnnnnnnnnnnnnnnnnnnnnnnnnnnnnnnnnnnnnnnnnnnnnnnnnnnnnnnnnnnnnnnnnnnnnnnnnnnnnnnnnnnnnnnnnnnnnnnnnnnnnnnnnnnnnnnnnnnnnnnnnnnnnnnnnnnnnnnnnnnnnnnnnnnnnnnnnnnnnnnnnnnnnnnnnnnnnnnnnnnnnnnnnnnnnnnnnnnnnnnnnnnnnnnnnnnnnnnnnnnnnnnnnnnnnnnnnnnnnnnnnnnnnnnnnnnnnnnnnnnnnnnnnnnnnnnnnnnnnnnnnnnnnnnnnnnnnnnnnnnnnnnnnnnnnnnnnnnnnnnnnnnnnnnnnnnnnnnnnnnnnnnnnnnnnnnnnnnnnnnnnnnnnnnnnnnnnnnnnnnnnnnnnnnnnnnnnnnnnnnnnnnnnnnnnnnnnnnnnnnnnnnnnnnnnnnnnnnnnnnnnnnnnnnnnnnnnnnnnnnnnnnnnnnnnnnnnnnnnnnnnnnnnnnnnnnnnnnnnnnnnnnnnnnnnnnnnnnnnnnnnnnnnnnnnnnnnnnnnnnnnnnnnnnnnnnnnnnnnnnnnnnnnnnnnnnnnnnnnnnnnnnnnnnnnnnnnnnnnnnnnnnnnnnnnnnnnnnnnnnnnnnnnnnnnnnnnnnnnnnnnnnnnnnnnnnnnnnnnnnnnnnnnnnnnnnnnnnnnnnnnnnnnnnnnnnnnnnnnnnnnnnnnnnnnnnnnnnnnnnnnnnnnnnnnnnnnnnnnnnnnnnnnnnnnnnnnnnnnnnnnnnnnnnnnnnnnnnnnnnnnnnnnnnnnnnnnnnnnnnnnnnnnnnnnnnnnnnnnnnnnnnnnnnnnnnnnnnnnnnnnnnnnnnnnnnnnnnnnnnnnnnnnnnnnnnnnnnnnnnnnnnnnnnnnnnnnnnnnnnnnnnnnnnnnnnnnnnnnnnnnnnnnnnnnnnnnnnnnnnnnnnnnnnnnnnnnnnnnnnnnnnnnnnnnnnnnnnnnnnnnnnnnnnnnnnnnnnnnnnnnnnnnnnnnnnnnnnnnnnnnnnnnnnnnnnnnnnnnnnnnnnnnnnnnnnnnnnnnnnnnnnnnnnnnnnnnnnnnnnnnnnnnnnnnnnnnnnnnnnnnnnnnnnnnnnnnnnnnnnnnnnnnnnnnnnnnnnnnnnnnnnnnnnnnnnnnnnnnnnnnnnnnnnnnnnnnnnnnnnnnnnnnnnnnnnnnnnnnnnnnnnnnnnnnnnnnnnnnnnnnnnnnnnnnnnnnnnnnnnnnnnnnnnnnnnnnnnnnnnnnnnnnnnnnnnnnnnnnnnnnnnnnnnnnnnnnnnnnnnnnnnnnnnnnnnnnnnnnnnnnnnnnnnnnnnnnnnnnnnnnnnnnnnnnnnnnnnnnnnnnnnnnnnnnnnnnnnnnnnnnnnnnnnnnnnnnnnnnnnnnnnnnnnnnnnnnnnnnnnnnnnnnnnnnnnnnnnnnnnnnnnnnnnnnnnnnnnnnnnnnnnnnnnnnnnnnnnnnnnnnnnnnnnnnnnnnnnnnnnnnnnnnnnnnnnnnnnnnnnnnnnnnnnnnnnnnnnnnnnnnnnnnnnnnnnnnnnnnnnnnnnnnnnnnnnnnnnnnnnnnnnnnnnnnnnnnnnnnnnnnnnnnnnnnnnnnnnnnnnnnnnnnnnnnnnnnnnnnnnnnnnnnnnnnnnnnnnnnnnnnnnnnnnnnnnnnnnnnnnnnnnnnnnnnnnnnnnnnnnnnnnnnnnnnnnnnnnnnnnnnnnnnnnnnnnnnnnnnnnnnnnnnnnnnnnnnnnnnnnnnnnnnnnnnnnnnnnnnnnnnnnnnnnnnnnnnnnnnnnnnnnnnnnnnnnnnnnnnnnnnnnnnnnnnnnnnnnnnnnnnnnnnnnnnnnnnnnnnnnnnnnnnnnnnnnnnnnnnnnnnnnnnnnnnnnnnnnnnnnnnnnnnnnnnnnnnnnnnnnnnnnnnnnnnnnnnnnnnnnnnnnnnnnnnnnnnnnnnnnnnnnnnnnnnnnnnnnnnnnnnnnnnnnnnnnnnnnnnnnnnnnnnnnnnnnnnnnnnnnnnnnnnnnnnnnnnnnnnnnnnnnnnnnnnnnnnnnnnnnnnnnnnnnnnnnnnnnnnnnnnnnnnnnnnnnnnnnnnnnnnnnnnnnnnnnnnnnnnnnnnnnnnnnnnnnnnnnnnnnnnnnnnnnnnnnnnnnnnnnnnnnnnnnnnnnnnnnnnnnnnnnnnnnnnnnnnnnnnnnnnnnnnnnnnnnnnnnnnnnnnnnnnnnnnnnnnnnnnnnnnnnnnnnnnnnnnnnnnnnnnnnnnnnnnnnnnnnnnnnnnnnnnnnnnnnnnnnnnnnnnnnnnnnnnnnnnnnnnnnnnnnnnnnnnnnnnnnnnnnnnnnnnnnnnnnnnnnnnnnnnnnnnnnnnnnnnnnnnnnnnnnnnnnnnnnnnnnnnnnnnnnnnnnnnnnnnnnnnnnnnnnnnnnnnnnnnnnnnnnnnnnnnnnnnnnnnnnnnnnnnnnnnnnnnnnnnnnnnnnnnnnnnnnnnnnnnnnnnnnnnnnnnnnnnnnnnnnnnnnnnnnnnnnnnnnnnnnnnnnnnnnnnnnnnnnnnnnnnnnnnnnnnnnnnnnnnnnnnnnnnnnnnnnnnnnnnnnnnnnnnnnnnnnnnnnnnnnnnnnnnnnnnnnnnnnnnnnnnnnnnnnnnnnnnnnnnnnnnnnnnnnnnnnnnnnnnnnnnnnnnnnnnnnnnnnnnnnnnnnnnnnnnnnnnnnnnnnnnnnnnnnnnnnnnnnnnnnnnnnnnnnnnnnnnnnnnnnnnnnnnnnnnnnnnnnnnnnnnnnnnnnnnnnnnnnnnnnnnnnnnnnnnnnnnnnnnnnnnnnnnnnnnnnnnnnnnnnnnnnnnnnnnnnnnnnnnnnnnnnnnnnnnnnnnnnnnnnnnnnnnnnnnnnnnnnnnnnnnnnnnnnnnnnnnnnnnnnnnnnnnnnnnnnnnnnnnnnnnnnnnnnnnnnnnnnnnnnnnnnnnnnnnnnnnnnnnnnnnnnnnnnnnnnnnnnnnnnnnnnnnnnnnnnnnnnnnnnnnnnnnnnnnnnnnnnnnnnnnnnnnnnnnnnnnnnnnnnnnnnnnnnnnnnnnnnnnnnnnnnnnnnnnnnnnnnnnnnnnnnnnnnnnnnnnnnnnnnnnnnnnnnnnnnnnnnnnnnnnnnnnnnnnnnnnnnnnnnnnnnnnnnnnnnnnnnnnnnnnnnnnnnnnnnnnnnnnnnnnnnnnnnnnnnnnnnnnnnnnnnnnnnnnnnnnnnnnnnnnnnnnnnnnnnnnnnnnnnnnnnnnnnnnnnnnnnnnnnnnnnnnnnnnnnnnnnnnnnnnnnnnnnnnnnnnnnnnnnnnnnnnnnnnnnnnnnnnnnnnnnnnnnnnnnnnnnnnnnnnnnnnnnnnnnnnnnnnnnnnnnnnnnnnnnnnnnnnnnnnnnnnnnnnnnnnnnnnnnnnnnnnnnnnnnnnnnnnnnnnnnnnnnnnnnnnnnnnnnnnnnnnnnnnnnnnnnnnnnnnnnnnnnnnnnnnnnnnnnnnnnnnnnnnnnnnnnnnnnnnnnnnnnnnnnnnnnnnnnnnnnnnnnnnnnnnnnnnnnnnnnnnnnnnnnnnnnnnnnnnnnnnnnnnnnnnnnnnnnnnnnnnnnnnnnnnnnnnnnnnnnnnnnnnnnnnnnnnnnnnnnnnnnnnnnnnnnnnnnnnnnnnnnnnnnnnnnnnnnnnnnnnnnnnnnnnnnnnnnnnnnnnnnnnnnnnnnnnnnnnnnnnnnnnnnnnnnnnnnnnnnnnnnnnnnnnnnnnnnnnnnnnnnnnnnnnnnnnnnnnnnnnnnnnnnnnnnnnnnnnnnnnnnnnnnnnnnnnnnnnnnnnnnnnnnnnnnnnnnnnnnnnnnnnnnnnnnnnnnnnnnnnnnnnnnnnnnnnnnnnnnnnnnnnnnnnnnnnnnnnnnnnnnnnnnnnnnnnnnnnnnnnnnnnnnnnnnnnnnnnnnnnnnnnnnnnnnnnnnnnnnnnnnnnnnnnnnnnnnnnnnnnnnnnnnnnnnnnnnnnnnnnnnnnnnnnnnnnnnnnnnnnnnnnnnnnnnnnnnnnnnnnnnnnnnnnnnnnnnnnnnnnnnnnnnnnnnnnnnnnnnnnnnnnnnnnnnnnnnnnnnnnnnnnnnnnnnnnnnnnnnnnnnnnnnnnnnnnnnnnnnnnnnnnnnnnnnnnnnnnnnnnnnnnnnnnnnnnnnnnnnnnnnnnnnnnnnnnnnnnnnnnnnnnnnnnnnnnnnnnnnnnnnnnnnnnnnnnnnnnnnnnnnnnnnnnnnnnnnnnnnnnnnnnnnnnnnnnnnnnnnnnnnnnnnnnnnnnnnnnnnnnnnnnnnnnnnnnnnnnnnnnnnnnnnnnnnnnnnnnnnnnnnnnnnnnnnnnnnnnnnnnnnnnnnnnnnnnnnnnnnnnnnnnnnnnnnnnnnnnnnnnnnnnnnnnnnnnnnnnnnnnnnnnnnnnnnnnnnnnnnnnnnnnnnnnnnnnnnnnnnnnnnnnnnnnnnnnnnnnnnnnnnnnnnnnnnnnnnnnnnnnnnnnnnnnnnnnnnnnnnnnnnnnnnnnnnnnnnnnnnnnnnnnnnnnnnnnnnnnnnnnnnnnnnnnnnnnnnnnnnnnnnnnnnnnnnnnnnnnnnnnnnnnnnnnnnnnnnnnnnnnnnnnnnnnnnnnnnnnnnnnnnnnnnnnnnnnnnnnnnnnnnnnnnnnnnnnnnnnnnnnnnnnnnnnnnnnnnnnnnnnnnnnnnnnnnnnnnnnnnnnnnnnnnnnnnnnnnnnnnnnnnnnnnnnnnnnnnnnnnnnnnnnnnnnnnnnnnnnnnnnnnnnnnnnnnnnnnnnnnnnnnnnnnnnnnnnnnnnnnnnnnnnnnnnnnnnnnnnnnnnnnnnnnnnnnnnnnnnnnnnnnnnnnnnnnnnnnnnnnnnnnnnnnnnnnnnnnnnnnnnnnnnnnnnnnnnnnnnnnnnnnnnnnnnnnnnnnnnnnnnnnnnnnnnnnnnnnnnnnnnnnnnnnnnnnnnnnnnnnnnnnnnnnnnnnnnnnnnnnnnnnnnnnnnnnnnnnnnnnnnnnnnnnnnnnnnnnnnnnnnnnnnnnnnnnnnnnnnnnnnnnnnnnnnnnnnnnnnnnnnnnnnnnnnnnnnnnnnnnnnnnnnnnnnnnnnnnnnnnnnnnnnnnnnnnnnnnnnnnnnnnnnnnnnnnnnnnnnnnnnnnnnnnnnnnnnnnnnnnnnnnnnnnnnnnnnnnnnnnnnnnnnnnnnnnnnnnnnnnnnnnnnnnnnnnnnnnnnnnnnnnnnnnnnnnnnnnnnnnnnnnnnnnnnnnnnnnnnnnnnnnnnnnnnnnnnnnnnnnnnnnnnnnnnnnnnnnnnnnnnnnnnnnnnnnnnnnnnnnnnnnnnnnnnnnnnnnnnnnnnnnnnnnnnnnnnnnnnnnnnnnnnnnnnnnnnnnnnnnnnnnnnnnnnnnnnnnnnnnnnnnnnnnnnnnnnnnnnnnnnnnnnnnnnnnnnnnnnnnnnnnnnnnnnnnnnnnnnnnnnnnnnnnnnnnnnnnnnnnnnnnnnnnnnnnnnnnnnnnnnnnnnnnnnnnnnnnnnnnnnnnnnnnnnnnnnnnnnnnnnnnnnnnnnnnnnnnnnnnnnnnnnnnnnnnnnnnnnnnnnnnnnnnnnnnnnnnnnnnnnnnnnnnnnnnnnnnnnnnnnnnnnnnnnnnnnnnnnnnnnnnnnnnnnnnnnnnnnnnnnnnnnnnnnnnnnnnnnnnnnnnnnnnnnnnnnnnnnnnnnnnnnnnnnnnnnnnnnnnnnnnnnnnnnnnnnnnnnnnnnnnnnnnnnnnnnnnnnnnnnnnnnnnnnnnnnnnnnnnnnnnnnnnnnnnnnnnnnnnnnnnnnnnnnnnnnnnnnnnnnnnnnnnnnnnnnnnnnnnnnnnnnnnnnnnnnnnnnnnnnnnnnnnnnnnnnnnnnnnnnnnnnnnnnnnnnnnnnnnnnnnnnnnnnnnnnnnnnnnnnnnnnnnnnnnnnnnnnnnnnnnnnnnnnnnnnnnnnnnnnnnnnnnnnnnnnnnnnnnnnnnnnnnnnnnnnnnnnnnnnnnnnnnnnnnnnnnnnnnnnnnnnnnnnnnnnnnnnnnnnnnnnnnnnnnnnnnnnnnnnnnnnnnnnnnnnnnnnnnnnnnnnnnnnnnnnnnnnnnnnnnnnnnnnnnnnnnnnnnnnnnnnnnnnnnnnnnnnnnnnnnnnnnnnnnnnnnnnnnnnnnnnnnnnnnnnnnnnnnnnnnnnnnnnnnnnnnnnnnnnnnnnnnnnnnnnnnnnnnnnnnnnnnnnnnnnnnnnnnnnnnnnnnnnnnnnnnnnnnnnnnnnnnnnnnnnnnnnnnnnnnnnnnnnnnnnnnnnnnnnnnnnnnnnnnnnnnnnnnnnnnnnnnnnnnnnnnnnnnnnnnnnnnnnnnnnnnnnnnnnnnnnnnnnnnnnnnnnnnnnnnnnnnnnnnnnnnnnnnnnnnnnnnnnnnnnnnnnnnnnnnnnnnnnnnnnnnnnnnnnnnnnnnnnnnnnnnnnnnnnnnnnnnnnnnnnnnnnnnnnnnnnnnnnnnnnnnnnnnnnnnnnnnnnnnnnnnnnnnnnnnnnnnnnnnnnnnnnnnnnnnnnnnnnnnnnnnnnnnnnnnnnnnnnnnnnnnnnnnnnnnnnnnnnnnnnnnnnnnnnnnnnnnnnnnnnnnnnnnnnnnnnnnnnnnnnnnnnnnnnnnnnnnnnnnnnnnnnnnnnnnnnnnnnnnnnnnnnnnnnnnnnnnnnnnnnnnnnnnnnnnnnnnnnnnnnnnnnnnnnnnnnnnnnnnnnnnnnnnnnnnnnnnnnnnnnnnnnnnnnnnnnnnnnnnnnnnnnnnnnnnnnnnnnnnnnnnnnnnnnnnnnnnnnnnnnnnnnnnnnnnnnnnnnnnnnnnnnnnnnnnnnnnnnnnnnnnnnnnnnnnnnnnnnnnnnnnnnnnnnnnnnnnnnnnnnnnnnnnnnnnnnnnnnnnnnnnnnnnnnnnnnnnnnnnnnnnnnnnnnnnnnnnnnnnnnnnnnnnnnnnnnnnnnnnnnnnnnnnnnnnnnnnnnnnnnnnnnnnnnnnnnnnnnnnnnnnnnnnnnnnnnnnnnnnnnnnnnnnnnnnnnnnnnnnnnnnnnnnnnnnnnnnnnnnnnnnnnnnnnnnnnnnnnnnnnnnnnnnnnnnnnnnnnnnnnnnnnnnnnnnnnnnnnnnnnnnnnnnnnnnnnnnnnnnnnnnnnnnnnnnnnnnnnnnnnnnnnnnnnnnnnnnnnnnnnnnnnnnnnnnnnnnnnnnnnnnnnnnnnnnnnnnnnnnnnnnnnnnnnnnnnnnnnnnnnnnnnnnnnnnnnnnnnnnnnnnnnnnnnnnnnnnnnnnnnnnnnnnnnnnnnnnnnnnnnnnnnnnnnnnnnnnnnnnnnnnnnnnnnnnnnnnnnnnnnnnnnnnnnnnnnnnnnnnnnnnnnnnnnnnnnnnnnnnnnnnnnnnnnnnnnnnnnnnnnnnnnnnnnnnnnnnnnnnnnnnnnnnnnnnnnnnnnnnnnnnnnnnnnnnnnnnnnnnnnnnnnnnnnnnnnnnnnnnnnnnnnnnnnnnnnnnnnnnnnnnnnnnnnnnnnnnnnnnnnnnnnnnnnnnnnnnnnnnnnnnnnnnnnnnnnnnnnnnnnnnnnnnnnnnnnnnnnnnnnnnnnnnnnnnnnnnnnnnnnnnnnnnnnnnnnnnnnnnnnnnnnnnnnnnnnnnnnnnnnnnnnnnnnnnnnnnnnnnnnnnnnnnnnnnnnnnnnnnnnnnnnnnnnnnnnnnnnnnnnnnnnnnnnnnnnnnnnnnnnnnnnnnnnnnnnnnnnnnnnnnnnnnnnnnnnnnnnnnnnnnnnnnnnnnnnnnnnnnnnnnnnnnnnnnnnnnnnnnnnnnnnnnnnnnnnnnnnnnnnnnnnnnnnnnnnnnnnnnnnnnnnnnnnnnnnnnnnnnnnnnnnnnnnnnnnnnnnnnnnnnnnnnnnnnnnnnnnnnnnnnnnnnnnnnnnnnnnnnnnnnnnnnnnnnnnnnnnnnnnnnnnnnnnnnnnnnnnnnnnnnnnnnnnnnnnnnnnnnnnnnnnnnnnnnnnnnnnnnnnnnnnnnnnnnnnnnnnnnnnnnnnnnnnnnnnnnnnnnnnnnnnnnnnnnnnnnnnnnnnnnnnnnnnnnnnnnnnnnnnnnnnnnnnnnnnnnnnnnnnnnnnnnnnnnnnnnnnnnnnnnnnnnnnnnnnnnnnnnnnnnnnnnnnnnnnnnnnnnnnnnnnnnnnnnnnnnnnnnnnnnnnnnnnnnnnnnnnnnnnnnnnnnnnnnnnnnnnnnnnnnnnnnnnnnnnnnnnnnnnnnnnnnnnnnnnnnnnnnnnnnnnnnnnnnnnnnnnnnnnnnnnnnnnnnnnnnnnnnnnnnnnnnnnnnnnnnnnnnnnnnnnnnnnnnnnnnnnnnnnnnnnnnnnnnnnnnnnnnnnnnnnnnnnnnnnnnnnnnnnnnnnnnnnnnnnnnnnnnnnnnnnnnnnnnnnnnnnnnnnnnnnnnnnnnnnnnnnnnnnnnnnnnnnnnnnnnnnnnnnnnnnnnnnnnnnnnnnnnnnnnnnnnnnnnnnnnnnnnnnnnnnnnnnnnnnnnnnnnnnnnnnnnnnnnnnnnnnnnnnnnnnnnnnnnnnnnnnnnnnnnnnnnnnnnnnnnnnnnnnnnnnnnnnnnnnnnnnnnnnnnnnnnnnnnnnnnnnnnnnnnnnnnnnnnnnnnnnnnnnnnnnnnnnnnnnnnnnnnnnnnnnnnnnnnnnnnnnnnnnnnnnnnnnnnnnnnnnnnnnnnnnnnnnnnnnnnnnnnnnnnnnnnnnnnnnnnnnnnnnnnnnnnnnnnnnnnnnnnnnnnnnnnnnnnnnnnnnnnnnnnnnnnnnnnnnnnnnnnnnnnnnnnnnnnnnnnnnnnnnnnnnnnnnnnnnnnnnnnnnnnnnnnnnnnnnnnnnnnnnnnnnnnnnnnnnnnnnnnnnnnnnnnnnnnnnnnnnnnnnnnnnnnnnnnnnnnnnnnnnnnnnnnnnnnnnnnnnnnnnnnnnnnnnnnnnnnnnnnnnnnnnnnnnnnnnnnnnnnnnnnnnnnnnnnnnnnnnnnnnnnnnnnnnnnnnnnnnnnnnnnnnnnnnnnnnnnnnnnnnnnnnnnnnnnnnnnnnnnnnnnnnnnnnnnnnnnnnnnnnnnnnnnnnnnnnnnnnnnnnnnnnnnnnnnnnnnnnnnnnnnnnnnnnnnnnnnnnnnnnnnnnnnnnnnnnnnnnnnnnnnnnnnnnnnnnnnnnnnnnnnnnnnnnnnnnnnnnnnnnnnnnnnnnnnnnnnnnnnnnnnnnnnnnnnnnnnnnnnnnnnnnnnnnnnnnnnnnnnnnnnnnnnnnnnnnnnnnnnnnnnnnnnnnnnnnnnnnnnnnnnnnnnnnnnnnnnnnnnnnnnnnnnnnnnnnnnnnnnnnnnnnnnnnnnnnnnnnnnnnnnnnnnnnnnnnnnnnnnnnnnnnnnnnnnnnnnnnnnnnnnnnnnnnnnnnnnnnnnnnnnnnnnnnnnnnnnnnnnnnnnnnnnnnnnnnnnnnnnnnnnnnnnnnnnnnnnnnnnnnnnnnnnnnnnnnnnnnnnnnnnnnnnnnnnnnnnnnnnnnnnnnnnnnnnnnnnnnnnnnnnnnnnnnnnnnnnnnnnnnnnnnnnnnnnnnnnnnnnnnnnnnnnnnnnnnnnnnnnnnnnnnnnnnnnnnnnnnnnnnnnnnnnnnnnnnnnnnnnnnnnnnnnnnnnnnnnnnnnnnnnnnnnnnnnnnnnnnnnnnnnnnnnnnnnnnnnnnnnnnnnnnnnnnnnnnnnnnnnnnnnnnnnnnnnnnnnnnnnnnnnnnnnnnnnnnnnnnnnnnnnnnnnnnnnnnnnnnnnnnnnnnnnnnnnnnnnnnnnnnnnnnnnnnnnnnnnnnnnnnnnnnnnnnnnnnnnnnnnnnnnnnnnnnnnnnnnnnnnnnnnnnnnnnnnnnnnnnnnnnnnnnnnnnnnnnnnnnnnnnnnnnnnnnnnnnnnnnnnnnnnnnnnnnnnnnnnnnnnnnnnnnnnnnnnnnnnnnnnnnnnnnnnnnnnnnnnnnnnnnnnnnnnnnnnnnnnnnnnnnnnnnnnnnnnnnnnnnnnnnnnnnnnnnnnnnnnnnnnnnnnnnnnnnnnnnnnnnnnnnnnnnnnnnnnnnnnnnnnnnnnnnnnnnnnnnnnnnnnnnnnnnnnnnnnnnnnnnnnnnnnnnnnnnnnnnnnnnnnnnnnnnnnnnnnnnnnnnnnnnnnnnnnnnnnnnnnnnnnnnnnnnnnnnnnnnnnnnnnnnnnnnnnnnnnnnnnnnnnnnnnnnnnnnnnnnnnnnnnnnnnnnnnnnnnnnnnnnnnnnnnnnnnnnnnnnnnnnnnnnnnnnnnnnnnnnnnnnnnnnnnnnnnnnnnnnnnnnnnnnnnnnnnnnnnnnnnnnnnnnnnnnnnnnnnnnnnnnnnnnnnnnnnnnnnnnnnnnnnnnnnnnnnnnnnnnnnnnnnnnnnnnnnnnnnnnnnnnnnnnnnnnnnnnnnnnnnnnnnnnnnnnnnnnnnnnnnnnnnnnnnnnnnnnnnnnnnnnnnnnnnnnnnnnnnnnnnnnnnnnnnnnnnnnnnnnnnnnnnnnnnnnnnnnnnnnnnnnnnnnnnnnnnnnnnnnnnnnnnnnnnnnnnnnnnnnnnnnnnnnnnnnnnnnnnnnnnnnnnnnnnnnnnnnnnnnnnnnnnnnnnnnnnnnnnnnnnnnnnnnnnnnnnnnnnnnnnnnnnnnnnnnnnnnnnnnnnnnnnnnnnnnnnnnnnnnnnnnnnnnnnnnnnnnnnnnnnnnnnnnnnnnnnnnnnnnnnnnnnnnnnnnnnnnnnnnnnnnnnnnnnnnnnnnnnnnnnnnnnnnnnnnnnnnnnnnnnnnnnnnnnnnnnnnnnnnnnnnnnnnnnnnnnnnnnnnnnnnnnnnnnnnnnnnnnnnnnnnnnnnnnnnnnnnnnnnnnnnnnnnnnnnnnnnnnnnnnnnnnnnnnnnnnnnnnnnnnnnnnnnnnnnnnnnnnnnnnnnnnnnnnnnnnnnnnnnnnnnnnnnnnnnnnnnnnnnnnnnnnnnnnnnnnnnnnnnnnnnnnnnnnnnnnnnnnnnnnnnnnnnnnnnnnnnnnnnnnnnnnnnnnnnnnnnnnnnnnnnnnnnnnnnnnnnnnnnnnnnnnnnnnnnnnnnnnnnnnnnnnnnnnnnnnnnnnnnnnnnnnnnnnnnnnnnnnnnnnnnnnnnnnnnnnnnnnnnnnnnnnnnnnnnnnnnnnnnnnnnnnnnnnnnnnnnnnnnnnnnnnnnnnnnnnnnnnnnnnnnnnnnnnnnnnnnnnnnnnnnnnnnnnnnnnnnnnnnnnnnnnnnnnnnnnnnnnnnnnnnnnnnnnnnnnnnnnnnnnnnnnnnnnnnnnnnnnnnnnnnnnnnnnnnnnnnnnnnnnnnnnnnnnnnnnnnnnnnnnnnnnnnnnnnnnnnnnnnnnnnnnnnnnnnnnnnnnnnnnnnnnnnnnnnnnnnnnnnnnnnnnnnnnnnnnnnnnnnnnnnnnnnnnnnnnnnnnnnnnnnnnnnnnnnnnnnnnnnnnnnnnnnnnnnnnnnnnnnnnnnnnnnnnnnnnnnnnnnnnnnnnnnnnnnnnnnnnnnnnnnnnnnnnnnnnnnnnnnnnnnnnnnnnnnnnnnnnnnnnnnnnnnnnnnnnnnnnnnnnnnnnnnnnnnnnnnnnnnnnnnnnnnnnnnnnnnnnnnnnnnnnnnnnnnnnnnnnnnnnnnnnnnnnnnnnnnnnnnnnnnnnnnnnnnnnnnnnnnnnnnnnnnnnnnnnnnnnnnnnnnnnnnnnnnnnnnnnnnnnnnnnnnnnnnnnnnnnnnnnnnnnnnnnnnnnnnnnnnnnnnnnnnnnnnnnnnnnnnnnnnnnnnnnnnnnnnnnnnnnnnnnnnnnnnnnnnnnnnnnnnnnnnnnnnnnnnnnnnnnnnnnnnnnnnnnnnnnnnnnnnnnnnnnnnnnnnnnnnnnnnnnnnnnnnnnnnnnnnnnnnnnnnnnnnnnnnnnnnnnnnnnnnnnnnnnnnnnnnnnnnnnnnnnnnnnnnnnnnnnnnnnnnnnnnnnnnnnnnnnnnnnnnnnnnnnnnnnnnnnnnnnnnnnnnnnnnnnnnnnnnnnnnnnnnnnnnnnnnnnnnnnnnnnnnnnnnnnnnnnnnnnnnnnnnnnnnnnnnnnnnnnnnnnnnnnnnnnnnnnnnnnnnnnnnnnnnnnnnnnnnnnnnnnnnnnnnnnnnnnnnnnnnnnnnnnnnnnnnnnnnnnnnnnnnnnnnnnnnnnnnnnnnnnnnnnnnnnnnnnnnnnnnnnnnnnnnnnnnnnnnnnnnnnnnnnnnnnnnnnnnnnnnnnnnnnnnnnnnnnnnnnnnnnnnnnnnnnnnnnnnnnnnnnnnnnnnnnnnnnnnnnnnnnnnnnnnnnnnnnnnnnnnnnnnnnnnnnnnnnnnnnnnnnnnnnnnnnnnnnnnnnnnnnnnnnnnnnnnnnnnnnnnnnnnnnnnnnnnnnnnnnnnnnnnnnnnnnnnnnnnnnnnnnnnnnnnnnnnnnnnnnnnnnnnnnnnnnnnnnnnnnnnnnnnnnnnnnnnnnnnnnnnnnnnnnnnnnnnnnnnnnnnnnnnnnnnnnnnnnnnnnnnnnnnnnnnnnnnnnnnnnnnnnnnnnnnnnnnnnnnnnnnnnnnnnnnnnnnnnnnnnnnnnnnnnnnnnnnnnnnnnnnnnnnnnnnnnnnnnnnnnnnnnnnnnnnnnnnnnnnnnnnnnnnnnnnnnnnnnnnnnnnnnnnnnnnnnnnnnnnnnnnnnnnnnnnnnnnnnnnnnnnnnnnnnnnnnnnnnnnnnnnnnnnnnnnnnnnnnnnnnnnnnnnnnnnnnnnnnnnnnnnnnnnnnnnnnnnnnnnnnnnnnnnnnnnnnnnnnnnnnnnnnnnnnnnnnnnnnnnnnnnnnnnnnnnnnnnnnnnnnnnnnnnnnnnnnnnnnnnnnnnnnnnnnnnnnnnnnnnnnnnnnnnnnnnnnnnnnnnnnnnnnnnnnnnnnnnnnnnnnnnnnnnnnnnnnnnnnnnnnnnnnnnnnnnnnnnnnnnnnnnnnnnnnnnnnnnnnnnnnnnnnnnnnnnnnnnnnnnnnnnnnnnnnnnnnnnnnnnnnnnnnnnnnnnnnnnnnnnnnnnnnnnnnnnnnnnnnnnnnnnnnnnnnnnnnnnnnnnnnnnnnnnnnnnnnnnnnnnnnnnnnnnnnnnnnnnnnnnnnnnnnnnnnnnnnnnnnnnnnnnnnnnnnnnnnnnnnnnnnnnnnnnnnnnnnnnnnnnnnnnnnnnnnnnnnnnnnnnnnnnnnnnnnnnnnnnnnnnnnnnnnnnnnnnnnnnnnnnnnnnnnnnnnnnnnnnnnnnnnnnnnnnnnnnnnnnnnnnnnnnnnnnnnnnnnnnnnnnnnnnnnnnnnnnnnnnnnnnnnnnnnnnnnnnnnnnnnnnnnnnnnnnnnnnnnnnnnnnnnnnnnnnnnnnnnnnnnnnnnnnnnnnnnnnnnnnnnnnnnnnnnnnnnnnnnnnnnnnnnnnnnnnnnnnnnnnnnnnnnnnnnnnnnnnnnnnnnnnnnnnnnnnnnnnnnnnnnnnnnnnnnnnnnnnnnnnnnnnnnnnnnnnnnnnnnnnnnnnnnnnnnnnnnnnnnnnnnnnnnnnnnnnnnnnnnnnnnnnnnnnnnnnnnnnnnnnnnnnnnnnnnnnnnnnnnnnnnnnnnnnnnnnnnnnnnnnnnnnnnnnnnnnnnnnnnnnnnnnnnnnnnnnnnnnnnnnnnnnnnnnnnnnnnnnnnnnnnnnnnnnnnnnnnnnnnnnnnnnnnnnnnnnnnnnnnnnnnnnnnnnnnnnnnnnnnnnnnnnnnnnnnnnnnnnnnnnnnnnnnnnnnnnnnnnnnnnnnnnnnnnnnnnnnnnnnnnnnnnnnnnnnnnnnnnnnnnnnnnnnnnnnnnnnnnnnnnnnnnnnnnnnnnnnnnnnnnnnnnnnnnnnnnnnnnnnnnnnnnnnnnnnnnnnnnnnnnnnnnnnnnnnnnnnnnnnnnnnnnnnnnnnnnnnnnnnnnnnnnnnnnnnnnnnnnnnnnnnnnnnnnnnnnnnnnnnnnnnnnnnnnnnnnnnnnnnnnnnnnnnnnnnnnnnnnnnnnnnnnnnnnnnnnnnnnnnnnnnnnnnnnnnnnnnnnnnnnnnnnnnnnnnnnnnnnnnnnnnnnnnnnnnnnnnnnnnnnnnnnnnnnnnnnnnnnnnnnnnnnnnnnnnnnnnnnnnnnnnnnnnnnnnnnnnnnnnnnnnnnnnnnnnnnnnnnnnnnnnnnnnnnnnnnnnnnnnnnnnnnnnnnnnnnnnnnnnnnnnnnnnnnnnnnnnnnnnnnnnnnnnnnnnnnnnnnnnnnnnnnnnnnnnnnnnnnnnnnnnnnnnnnnnnnnnnnnnnnnnnnnnnnnnnnnnnnnnnnnnnnnnnnnnnnnnnnnnnnnnnnnnnnnnnnnnnnnnnnnnnnnnnnnnnnnnnnnnnnnnnnnnnnnnnnnnnnnnnnnnnnnnnnnnnnnnnnnnnnnnnnnnnnnnnnnnnnnnnnnnnnnnnnnnnnnnnnnnnnnnnnnnnnnnnnnnnnnnnnnnnnnnnnnnnnnnnnnnnnnnnnnnnnnnnnnnnnnnnnnnnnnnnnnnnnnnnnnnnnnnnnnnnnnnnnnnnnnnnnnnnnnnnnnnnnnnnnnnnnnnnnnnnnnnnnnnnnnnnnnnnnnnnnnnnnnnnnnnnnnnnnnnnnnnnnnnnnnnnnnnnnnnnnnnnnnnnnnnnnnnnnnnnnnnnnnnnnnnnnnnnnnnnnnnnnnnnnnnnnnnnnnnnnnnnnnnnnnnnnnnnnnnnnnnnnnnnnnnnnnnnnnnnnnnnnnnnnnnnnnnnnnnnnnnnnnnnnnnnnnnnnnnnnnnnnnnnnnnnnnnnnnnnnnnnnnnnnnnnnnnnnnnnnnnnnnnnnnnnnnnnnnnnnnnnnnnnnnnnnnnnnnnnnnnnnnnnnnnnnnnnnnnnnnnnnnnnnnnnnnnnnnnnnnnnnnnnnnnnnnnnnnnnnnnnnnnnnnnnnnnnnnnnnnnnnnnnnnnnnnnnnnnnnnnnnnnnnnnnnnnnnnnnnnnnnnnnnnnnnnnnnnnnnnnnnnnnnnnnnnnnnnnnnnnnnnnnnnnnnnnnnnnnnnnnnnnnnnnnnnnnnnnnnnnnnnnnnnnnnnnnnnnnnnnnnnnnnnnnnnnnnnnnnnnnnnnnnnnnnnnnnnnnnnnnnnnnnnnnnnnnnnnnnnnnnnnnnnnnnnnnnnnnnnnnnnnnnnnnnnnnnnnnnnnnnnnnnnnnnnnnnnnnnnnnnnnnnnnnnnnnnnnnnnnnnnnnnnnnnnnnnnnnnnnnnnnnnnnnnnnnnnnnnnnnnnnnnnnnnnnnnnnnnnnnnnnnnnnnnnnnnnnnnnnnnnnnnnnnnnnnnnnnnnnnnnnnnnnnnnnnnnnnnnnnnnnnnnnnnnnnnnnnnnnnnnnnnnnnnnnnnnnnnnnnnnnnnnnnnnnnnnnnnnnnnnnnnnnnnnnnnnnnnnnnnnnnnnnnnnnnnnnnnnnnnnnnnnnnnnnnnnnnnnnnnnnnnnnnnnnnnnnnnnnnnnnnnnnnnnnnnnnnnnnnnnnnnnnnnnnnnnnnnnnnnnnnnnnnnnnnnnnnnnnnnnnnnnnnnnnnnnnnnnnnnnnnnnnnnnnnnnnnnnnnnnnnnnnnnnnnnnnnnnnnnnnnnnnnnnnnnnnnnnnnnnnnnnnnnnnnnnnnnnnnnnnnnnnnnnnnnnnnnnnnnnnnnnnnnnnnnnnnnnnnnnnnnnnnnnnnnnnnnnnnnnnnnnnnnnnnnnnnnnnnnnnnnnnnnnnnnnnnnnnnnnnnnnnnnnnnnnnnnnnnnnnnnnnnnnnnnnnnnnnnnnnnnnnnnnnnnnnnnnnnnnnnnnnnnnnnnnnnnnnnnnnnnnnnnnnnnnnnnnnnnnnnnnnnnnnnnnnnnnnnnnnnnnnnnnnnnnnnnnnnnnnnnnnnnnnnnnnnnnnnnnnnnnnnnnnnnnnnnnnnnnnnnnnnnnnnnnnnnnnnnnnnnnnnnnnnnnnnnnnnnnnnnnnnnnnnnnnnnnnnnnnnnnnnnnnnnnnnnnnnnnnnnnnnnnnnnnnnnnnnnnnnnnnnnnnnnnnnnnnnnnnnnnnnnnnnnnnnnnnnnnnnnnnnnnnnnnnnnnnnnnnnnnnnnnnnnnnnnnnnnnnnnnnnnnnnnnnnnnnnnnnnnnnnnnnnnnnnnnnnnnnnnnnnnnnnnnnnnnnnnnnnnnnnnnnnnnnnnnnnnnnnnnnnnnnnnnnnnnnnnnnnnnnnnnnnnnnnnnnnnnnnnnnnnnnnnnnnnnnnnnnnnnnnnnnnnnnnnnnnnnnnnnnnnnnnnnnnnnnnnnnnnnnnnnnnnnnnnnnnnnnnnnnnnnnnnnnnnnnnnnnnnnnnnnnnnnnnnnnnnnnnnnnnnnnnnnnnnnnnnnnnnnnnnnnnnnnnnnnnnnnnnnnnnnnnnnnnnnnnnnnnnnnnnnnnnnnnnnnnnnnnnnnnnnnnnnnnnnnnnnnnnnnnnnnnnnnnnnnnnnnnnnnnnnnnnnnnnnnnnnnnnnnnnnnnnnnnnnnnnnnnnnnnnnnnnnnnnnnnnnnnnnnnnnnnnnnnnnnnnnnnnnnnnnnnnnnnnnnnnnnnnnnnnnnnnnnnnnnnnnnnnnnnnnnnnnnnnnnnnnnnnnnnnnnnnnnnnnnnnnnnnnnnnnnnnnnnnnnnnnnnnnnnnnnnnnnnnnnnnnnnnnnnnnnnnnnnnnnnnnnnnnnnnnnnnnnnnnnnnnnnnnnnnnnnnnnnnnnnnnnnnnnnnnnnnnnnnnnnnnnnnnnnnnnnnnnnnnnnnnnnnnnnnnnnnnnnnnnnnnnnnnnnnnnnnnnnnnnnnnnnnnnnnnnnnnnnnnnnnnnnnnnnnnnnnnnnnnnnnnnnnnnnnnnnnnnnnnnnnnnnnnnnnnnnnnnnnnnnnnnnnnnnnnnnnnnnnnnnnnnnnnnnnnnnnnnnnnnnnnnnnnnnnnnnnnnnnnnnnnnnnnnnnnnnnnnnnnnnnnnnnnnnnnnnnnnnnnnnnnnnnnnnnnnnnnnnnnnnnnnnnnnnnnnnnnnnnnnnnnnnnnnnnnnnnnnnnnnnnnnnnnnnnnnnnnnnnnnnnnnnnnnnnnnnnnnnnnnnnnnnnnnnnnnnnnnnnnnnnnnnnnnnnnnnnnnnnnnnnnnnnnnnnnnnnnnnnnnnnnnnnnnnnnnnnnnnnnnnnnnnnnnnnnnnnnnnnnnnnnnnnnnnnnnnnnnnnnnnnnnnnnnnnnnnnnnnnnnnnnnnnnnnnnnnnnnnnnnnnnnnnnnnnnnnnnnnnnnnnnnnnnnnnnnnnnnnnnnnnnnnnnnnnnnnnnnnnnnnnnnnnnnnnnnnnnnnnnnnnnnnnnnnnnnnnnnnnnnnnnnnnnnnnnnnnnnnnnnnnnnnnnnnnnnnnnnnnnnnnnnnnnnnnnnnnnnnnnnnnnnnnnnnnnnnnnnnnnnnnnnnnnnnnnnnnnnnnnnnnnnnnnnnnnnnnnnnnnnnnnnnnnnnnnnnnnnnnnnnnnnnnnnnnnnnnnnnnnnnnnnnnnnnnnnnnnnnnnnnnnnnnnnnnnnnnnnnnnnnnnnnnnnnnnnnnnnnnnnnnnnnnnnnnnnnnnnnnnnnnnnnnnnnnnnnnnnnnnnnnnnnnnnnnnnnnnnnnnnnnnnnnnnnnnnnnnnnnnnnnnnnnnnnnnnnnnnnnnnnnnnnnnnnnnnnnnnnnnnnnnnnnnnnnnnnnnnnnnnnnnnnnnnnnnnnnnnnnnnnnnnnnnnnnnnnnnnnnnnnnnnnnnnnnnnnnnnnnnnnnnnnnnnnnnnnnnnnnnnnnnnnnnnnnnnnnnnnnnnnnnnnnnnnnnnnnnnnnnnnnnnnnnnnnnnnnnnnnnnnnnnnnnnnnnnnnnnnnnnnnnnnnnnnnnnnnnnnnnnnnnnnnnnnnnnnnnnnnnnnnnnnnnnnnnnnnnnnnnnnnnnnnnnnnnnnnnnnnnnnnnnnnnnnnnnnnnnnnnnnnnnnnnnnnnnnnnnnnnnnnnnnnnnnnnnnnnnnnnnnnnnnnnnnnnnnnnnnnnnnnnnnnnnnnnnnnnnnnnnnnnnnnnnnnnnnnnnnnnnnnnnnnnnnnnnnnnnnnnnnnnnnnnnnnnnnnnnnnnnnnnnnnnnnnnnnnnnnnnnnnnnnnnnnnnnnnnnnnnnnnnnnnnnnnnnnnnnnnnnnnnnnnnnnnnnnnnnnnnnnnnnnnnnnnnnnnnnnnnnnnnnnnnnnnnnnnnnnnnnnnnnnnnnnnnnnnnnnnnnnnnnnnnnnnnnnnnnnnnnnnnnnnnnnnnnnnnnnnnnnnnnnnnnnnnnnnnnnnnnnnnnnnnnnnnnnnnnnnnnnnnnnnnnnnnnnnnnnnnnnnnnnnnnnnnnnnnnnnnnnnnnnnnnnnnnnnnnnnnnnnnnnnnnnnnnnnnnnnnnnnnnnnnnnnnnnnnnnnnnnnnnnnnnnnnnnnnnnnnnnnnnnnnnnnnnnnnnnnnnnnnnnnnnnnnnnnnnnnnnnnnnnnnnnnnnnnnnnnnnnnnnnnnnnnnnnnnnnnnnnnnnnnnnnnnnnnnnnnnnnnnnnnnnnnnnnnnnnnnnnnnnnnnnnnnnnnnnnnnnnnnnnnnnnnnnnnnnnnnnnnnnnnnnnnnnnnnnnnnnnnnnnnnnnnnnnnnnnnnnnnnnnnnnnnnnnnnnnnnnnnnnnnnnnnnnnnnnnnnnnnnnnnnnnnnnnnnnnnnnnnnnnnnnnnnnnnnnnnnnnnnnnnnnnnnnnnnnnnnnnnnnnnnnnnnnnnnnnnnnnnnnnnnnnnnnnnnnnnnnnnnnnnnnnnnnnnnnnnnnnnnnnnnnnnnnnnnnnnnnnnnnnnnnnnnnnnnnnnnnnnnnnnnnnnnnnnnnnnnnnnnnnnnnnnnnnnnnnnnnnnnnnnnnnnnnnnnnnnnnnnnnnnnnnnnnnnnnnnnnnnnnnnnnnnnnnnnnnnnnnnnnnnnnnnnnnnnnnnnnnnnnnnnnnnnnnnnnnnnnnnnnnnnnnnnnnnnnnnnnnnnnnnnnnnnnnnnnnnnnnnnnnnnnnnnnnnnnnnnnnnnnnnnnnnnnnnnnnnnnnnnnnnnnnnnnnnnnnnnnnnnnnnnnnnnnnnnnnnnnnnnnnnnnnnnnnnnnnnnnnnnnnnnnnnnnnnnnnnnnnnnnnnnnnnnnnnnnnnnnnnnnnnnnnnnnnnnnnnnnnnnnnnnnnnnnnnnnnnnnnnnnnnnnnnnnnnnnnnnnnnnnnnnnnnnnnnnnnnnnnnnnnnnnnnnnnnnnnnnnnnnnnnnnnnnnnnnnnnnnnnnnnnnnnnnnnnnnnnnnnnnnnnnnnnnnnnnnnnnnnnnnnnnnnnnnnnnnnnnnnnnnnnnnnnnnnnnnnnnnnnnnnnnnnnnnnnnnnnnnnnnnnnnnnnnnnnnnnnnnnnnnnnnnnnnnnnnnnnnnnnnnnnnnnnnnnnnnnnnnnnnnnnnnnnnnnnnnnnnnnnnnnnnnnnnnnnnnnnnnnnnnnnnnnnnnnnnnnnnnnnnnnnnnnnnnnnnnnnnnnnnnnnnnnnnnnnnnnnnnnnnnnnnnnnnnnnnnnnnnnnnnnnnnnnnnnnnnnnnnnnnnnnnnnnnnnnnnnnnnnnnnnnnnnnnnnnnnnnnnnnnnnnnnnnnnnnnnnnnnnnnnnnnnnnnnnnnnnnnnnnnnnnnnnnnnnnnnnnnnnnnnnnnnnnnnnnnnnnnnnnnnnnnnnnnnnnnnnnnnnnnnnnnnnnnnnnnnnnnnnnnnnnnnnnnnnnnnnnnnnnnnnnnnnnnnnnnnnnnnnnnnnnnnnnnnnnnnnnnnnnnnnnnnnnnnnnnnnnnnnnnnnnnnnnnnnnnnnnnnnnnnnnnnnnnnnnnnnnnnnnnnnnnnnnnnnnnnnnnnnnnnnnnnnnnnnnnnnnnnnnnnnnnnnnnnnnnnnnnnnnnnnnnnnnnnnnnnnnnnnnnnnnnnnnnnnnnnnnnnnnnnnnnnnnnnnnnnnnnnnnnnnnnnnnnnnnnnnnnnnnnnnnnnnnnnnnnnnnnnnnnnnnnnnnnnnnnnnnnnnnnnnnnnnnnnnnnnnnnnnnnnnnnnnnnnnnnnnnnnnnnnnnnnnnnnnnnnnnnnnnnnnnnnnnnnnnnnnnnnnnnnnnnnnnnnnnnnnnnnnnnnnnnnnnnnnnnnnnnnnnnnnnnnnnnnnnnnnnnnnnnnnnnnnnnnnnnnnnnnnnnnnnnnnnnnnnnnnnnnnnnnnnnnnnnnnnnnnnnnnnnnnnnnnnnnnnnnnnnnnnnnnnnnnnnnnnnnnnnnnnnnnnnnnnnnnnnnnnnnnnnnnnnnnnnnnnnnnnnnnnnnnnnnnnnnnnnnnnnnnnnnnnnnnnnnnnnnnnnnnnnnnnnnnnnnnnnnnnnnnnnnnnnnnnnnnnnnnnnnnnnnnnnnnnnnnnnnnnnnnnnnnnnnnnnnnnnnnnnnnnnnnnnnnnnnnnnnnnnnnnnnnnnnnnnnnnnnnnnnnnnnnnnnnnnnnnnnnnnnnnnnnnnnnnnnnnnnnnnnnnnnnnnnnnnnnnnnnnnnnnnnnnnnnnnnnnnnnnnnnnnnnnnnnnnnnnnnnnnnnnnnnnnnnnnnnnnnnnnnnnnnnnnnnnnnnnnnnnnnnnnnnnnnnnnnnnnnnnnnnnnnnnnnnnnnnnnnnnnnnnnnnnnnnnnnnnnnnnnnnnnnnnnnnnnnnnnnnnnnnnnnnnnnnnnnnnnnnnnnnnnnnnnnnnnnnnnnnnnnnnnnnnnnnnnnnnnnnnnnnnnnnnnnnnnnnnnnnnnnnnnnnnnnnnnnnnnnnnnnnnnnnnnnnnnnnnnnnnnnnnnnnnnnnnnnnnnnnnnnnnnnnnnnnnnnnnnnnnnnnnnnnnnnnnnnnnnnnnnnnnnnnnnnnnnnnnnnnnnnnnnnnnnnnnnnnnnnnnnnnnnnnnnnnnnnnnnnnnnnnnnnnnnnnnnnnnnnnnnnnnnnnnnnnnnnnnnnnnnnnnnnnnnnnnnnnnnnnnnnnnnnnnnnnnnnnnnnnnnnnnnnnnnnnnnnnnnnnnnnnnnnnnnnnnnnnnnnnnnnnnnnnnnnnnnnnnnnnnnnnnnnnnnnnnnnnnnnnnnnnnnnnnnnnnnnnnnnnnnnnnnnnnnnnnnnnnnnnnnnnnnnnnnnnnnnnnnnnnnnnnnnnnnnnnnnnnnnnnnnnnnnnnnnnnnnnnnnnnnnnnnnnnnnnnnnnnnnnnnnnnnnnnnnnnnnnnnnnnnnnnnnnnnnnnnnnnnnnnnnnnnnnnnnnnnnnnnnnnnnnnnnnnnnnnnnnnnnnnnnnnnnnnnnnnnnnnnnnnnnnnnnnnnnnnnnnnnnnnnnnnnnnnnnnnnnnnnnnnnnnnnnnnnnnnnnnnnnnnnnnnnnnnnnnnnnnnnnnnnnnnnnnnnnnnnnnnnnnnnnnnnnnnnnnnnnnnnnnnnnnnnnnnnnnnnnnnnnnnnnnnnnnnnnnnnnnnnnnnnnnnnnnnnnnnnnnnnnnnnnnnnnnnnnnnnnnnnnnnnnnnnnnnnnnnnnnnnnnnnnnnnnnnnnnnnnnnnnnnnnnnnnnnnnnnnnnnnnnnnnnnnnnnnnnnnnnnnnnnnnnnnnnnnnnnnnnnnnnnnnnnnnnnnnnnnnnnnnnnnnnnnnnnnnnnnnnnnnnnnnnnnnnnnnnnnnnnnnnnnnnnnnnnnnnnnnnnnnnnnnnnnnnnnnnnnnnnnnnnnnnnnnnnnnnnnnnnnnnnnnnnnnnnnnnnnnnnnnnnnnnnnnnnnnnnnnnnnnnnnnnnnnnnnnnnnnnnnnnnnnnnnnnnnnnnnnnnnnnnnnnnnnnnnnnnnnnnnnnnnnnnnnnnnnnnnnnnnnnnnnnnnnnnnnnnnnnnnnnnnnnnnnnnnnnnnnnnnnnnnnnnnnnnnnnnnnnnnnnnnnnnnnnnnnnnnnnnnnnnnnnnnnnnnnnnnnnnnnnnnnnnnnnnnnnnnnnnnnnnnnnnnnnnnnnnnnnnnnnnnnnnnnnnnnnnnnnnnnnnnnnnnnnnnnnnnnnnnnnnnnnnnnnnnnnnnnnnnnnnnnnnnnnnnnnnnnnnnnnnnnnnnnnnnnnnnnnnnnnnnnnnnnnnnnnnnnnnnnnnnnnnnnnnnnnnnnnnnnnnnnnnnnnnnnnnnnnnnnnnnnnnnnnnnnnnnnnnnnnnnnnnnnnnnnnnnnnnnnnnnnnnnnnnnnnnnnnnnnnnnnnnnnnnnnnnnnnnnnnnnnnnnnnnnnnnnnnnnnnnnnnnnnnnnnnnnnnnnnnnnnnnnnnnnnnnnnnnnnnnnnnnnnnnnnnnnnnnnnnnnnnnnnnnnnnnnnnnnnnnnnnnnnnnnnnnnnnnnnnnnnnnnnnnnnnnnnnnnnnnnnnnnnnnnnnnnnnnnnnnnnnnnnnnnnnnnnnnnnnnnnnnnnnnnnnnnnnnnnnnnnnnnnnnnnnnnnnnnnnnnnnnnnnnnnnnnnnnnnnnnnnnnnnnnnnnnnnnnnnnnnnnnnnnnnnnnnnnnnnnnnnnnnnnnnnnnnnnnnnnnnnnnnnnnnnnnnnnnnnnnnnnnnnnnnnnnnnnnnnnnnnnnnnnnnnnnnnnnnnnnnnnnnnnnnnnnnnnnnnnnnnnnnnnnnnnnnnnnnnnnnnnnnnnnnnnnnnnnnnnnnnnnnnnnnnnnnnnnnnnnnnnnnnnnnnnnnnnnnnnnnnnnnnnnnnnnnnnnnnnnnnnnnnnnnnnnnnnnnnnnnnnnnnnnnnnnnnnnnnnnnnnnnnnnnnnnnnnnnnnnnnnnnnnnnnnnnnnnnnnnnnnnnnnnnnnnnnnnnnnnnnnnnnnnnnnnnnnnnnnnnnnnnnnnnnnnnnnnnnnnnnnnnnnnnnnnnnnnnnnnnnnnnnnnnnnnnnnnnnnnnnnnnnnnnnnnnnnnnnnnnnnnnnnnnnnnnnnnnnnnnnnnnnnnnnnnnnnnnnnnnnnnnnnnnnnnnnnnnnnnnnnnnnnnnnnnnnnnnnnnnnnnnnnnnnnnnnnnnnnnnnnnnnnnnnnnnnnnnnnnnnnnnnnnnnnnnnnnnnnnnnnnnnnnnnnnnnnnnnnnnnnnnnnnnnnnnnnnnnnnnnnnnnnnnnnnnnnnnnnnnnnnnnnnnnnnnnnnnnnnnnnnnnnnnnnnnnnnnnnnnnnnnnnnnnnnnnnnnnnnnnnnnnnnnnnnnnnnnnnnnnnnnnnnnnnnnnnnnnnnnnnnnnnnnnnnnnnnnnnnnnnnnnnnnnnnnnnnnnnnnnnnnnnnnnnnnnnnnnnnnnnnnnnnnnnnnnnnnnnnnnnnnnnnnnnnnnnnnnnnnnnnnnnnnnnnnnnnnnnnnnnnnnnnnnnnnnnnnnnnnnnnnnnnnnnnnnnnnnnnnnnnnnnnnnnnnnnnnnnnnnnnnnnnnnnnnnnnnnnnnnnnnnnnnnnnnnnnnnnnnnnnnnnnnnnnnnnnnnnnnnnnnnnnnnnnnnnnnnnnnnnnnnnnnnnnnnnnnnnnnnnnnnnnnnnnnnnnnnnnnnnnnnnnnnnnnnnnnnnnnnnnnnnnnnnnnnnnnnnnnnnnnnnnnnnnnnnnnnnnnnnnnnnnnnnnnnnnnnnnnnnnnnnnnnnnnnnnnnnnnnnnnnnnnnnnnnnnnnnnnnnnnnnnnnnnnnnnnnnnnnnnnnnnnnnnnnnnnnnnnnnnnnnnnnnnnnnnnnnnnnnnnnnnnnnnnnnnnnnnnnnnnnnnnnnnnnnnnnnnnnnnnnnnnnnnnnnnnnnnnnnnnnnnnnnnnnnnnnnnnnnnnnnnnnnnnnnnnnnnnnnnnnnnnnnnnnnnnnnnnnnnnnnnnnnnnnnnnnnnnnnnnnnnnnnnnnnnnnnnnnnnnnnnnnnnnnnnnnnnnnnnnnnnnnnnnnnnnnnnnnnnnnnnnnnnnnnnnnnnnnnnnnnnnnnnnnnnnnnnnnnnnnnnnnnnnnnnnnnnnnnnnnnnnnnnnnnnnnnnnnnnnnnnnnnnnnnnnnnnnnnnnnnnnnnnnnnnnnnnnnnnnnnnnnnnnnnnnnnnnnnnnnnnnnnnnnnnnnnnnnnnnnnnnnnnnnnnnnnnnnnnnnnnnnnnnnnnnnnnnnnnnnnnnnnnnnnnnnnnnnnnnnnnnnnnnnnnnnnnnnnnnnnnnnnnnnnnnnnnnnnnnnnnnnnnnnnnnnnnnnnnnnnnnnnnnnnnnnnnnnnnnnnnnnnnnnnnnnnnnnnnnnnnnnnnnnnnnnnnnnnnnnnnnnnnnnnnnnnnnnnnnnnnnnnnnnnnnnnnnnnnnnnnnnnnnnnnnnnnnnnnnnnnnnnnnnnnnnnnnnnnnnnnnnnnnnnnnnnnnnnnnnnnnnnnnnnnnnnnnnnnnnnnnnnnnnnnnnnnnnnnnnnnnnnnnnnnnnnnnnnnnnnnnnnnnnnnnnnnnnnnnnnnnnnnnnnnnnnnnnnnnnnnnnnnnnnnnnnnnnnnnnnnnnnnnnnnnnnnnnnnnnnnnnnnnnnnnnnnnnnnnnnnnnnnnnnnnnnnnnnnnnnnnnnnnnnnnnnnnnnnnnnnnnnnnnnnnnnnnnnnnnnnnnnnnnnnnnnnnnnnnnnnnnnnnnnnnnnnnnnnnnnnnnnnnnnnnnnnnnnnnnnnnnnnnnnnnnnnnnnnnnnnnnnnnnnnnnnnnnnnnnnnnnnnnnnnnnnnnnnnnnnnnnnnnnnnnnnnnnnnnnnnnnnnnnnnnnnnnnnnnnnnnnnnnnnnnnnnnnnnnnnnnnnnnnnnnnnnnnnnnnnnnnnnnnnnnnnnnnnnnnnnnnnnnnnnnnnnnnnnnnnnnnnnnnnnnnnnnnnnnnnnnnnnnnnnnnnnnnnnnnnnnnnnnnnnnnnnnnnnnnnnnnnnnnnnnnnnnnnnnnnnnnnnnnnnnnnnnnnnnnnnnnnnnnnnnnnnnnnnnnnnnnnnnnnnnnnnnnnnnnnnnnnnnnnnnnnnnnnnnnnnnnnnnnnnnnnnnnnnnnnnnnnnnnnnnnnnnnnnnnnnnnnnnnnnnnnnnnnnnnnnnnnnnnnnnnnnnnnnnnnnnnnnnnnnnnnnnnnnnnnnnnnnnnnnnnnnnnnnnnnnnnnnnnnnnnnnnnnnnnnnnnnnnnnnnnnnnnnnnnnnnnnnnnnnnnnnnnnnnnnnnnnnnnnnnnnnnnnnnnnnnnnnnnnnnnnnnnnnnnnnnnnnnnnnnnnnnnnnnnnnnnnnnnnnnnnnnnnnnnnnnnnnnnnnnnnnnnnnnnnnnnnnnnnnnnnnnnnnnnnnnnnnnnnnnnnnnnnnnnnnnnnnnnnnnnnnnnnnnnnnnnnnnnnnnnnnnnnnnnnnnnnnnnnnnnnnnnnnnnnnnnnnnnnnnnnnnnnnnnnnnnnnnnnnnnnnnnnnnnnnnnnnnnnnnnnnnnnnnnnnnnnnnnnnnnnnnnnnnnnnnnnnnnnnnnnnnnnnnnnnnnnnnnnnnnnnnnnnnnnnnnnnnnnnnnnnnnnnnnnnnnnnnnnnnnnnnnnnnnnnnnnnnnnnnnnnnnnnnnnnnnnnnnnnnnnnnnnnnnnnnnnnnnnnnnnnnnnnnnnnnnnnnnnnnnnnnnnnnnnnnnnnnnnnnnnnnnnnnnnnnnnnnnnnnnnnnnnnnnnnnnnnnnnnnnnnnnnnnnnnnnnnnnnnnnnnnnnnnnnnnnnnnnnnnnnnnnnnnnnnnnnnnnnnnnnnnnnnnnnnnnnnnnnnnnnnnnnnnnnnnnnnnnnnnnnnnnnnnnnnnnnnnnnnnnnnnnnnnnnnnnnnnnnnnnnnnnnnnnnnnnnnnnnnnnnnnnnnnnnnnnnnnnnnnnnnnnnnnnnnnnnnnnnnnnnnnnnnnnnnnnnnnnnnnnnnnnnnnnnnnnnnnnnnnnnnnnnnnnnnnnnnnnnnnnnnnnnnnnnnnnnnnnnnnnnnnnnnnnnnnnnnnnnnnnnnnnnnnnnnnnnnnnnnnnnnnnnnnnnnnnnnnnnnnnnnnnnnnnnnnnnnnnnnnnnnnnnnnnnnnnnnnnnnnnnnnnnnnnnnnnnnnnnnnnnnnnnnnnnnnnnnnnnnnnnnnnnnnnnnnnnnnnnnnnnnnnnnnnnnnnnnnnnnnnnnnnnnnnnnnnnnnnnnnnnnnnnnnnnnnnnnnnnnnnnnnnnnnnnnnnnnnnnnnnnnnnnnnnnnnnnnnnnnnnnnnnnnnnnnnnnnnnnnnnnnnnnnnnnnnnnnnnnnnnnnnnnnnnnnnnnnnnnnnnnnnnnnnnnnnnnnnnnnnnnnnnnnnnnnnnnnnnnnnnnnnnnnnnnnnnnnnnnnnnnnnnnnnnnnnnnnnnnnnnnnnnnnnnnnnnnnnnnnnnnnnnnnnnnnnnnnnnnnnnnnnnnnnnnnnnnnnnnnnnnnnnnnnnnnnnnnnnnnnnnnnnnnnnnnnnnnnnnnnnnnnnnnnnnnnnnnnnnnnnnnnnnnnnnnnnnnnnnnnnnnnnnnnnnnnnnnnnnnnnnnnnnnnnnnnnnnnnnnnnnnnnnnnnnnnnnnnnnnnnnnnnnnnnnnnnnnnnnnnnnnnnnnnnnnnnnnnnnnnnnnnnnnnnnnnnnnnnnnnnnnnnnnnnnnnnnnnnnnnnnnnnnnnnnnnnnnnnnnnnnnnnnnnnnnnnnnnnnnnnnnnnnnnnnnnnnnnnnnnnnnnnnnnnnnnnnnnnnnnnnnnnnnnnnnnnnnnnnnnnnnnnnnnnnnnnnnnnnnnnnnnnnnnnnnnnnnnnnnnnnnnnnnnnnnnnnnnnnnnnnnnnnnnnnnnnnnnnnnnnnnnnnnnnnnnnnnnnnnnnnnnnnnnnnnnnnnnnnnnnnnnnnnnnnnnnnnnnnnnnnnnnnnnnnnnnnnnnnnnnnnnnnnnnnnnnnnnnnnnnnnnnnnnnnnnnnnnnnnnnnnnnnnnnnnnnnnnnnnnnnnnnnnnnnnnnnnnnnnnnnnnnnnnnnnnnnnnnnnnnnnnnnnnnnnnnnnnnnnnnnnnnnnnnnnnnnnnnnnnnnnnnnnnnnnnnnnnnnnnnnnnnnnnnnnnnnnnnnnnnnnnnnnnnnnnnnnnnnnnnnnnnnnnnnnnnnnnnnnnnnnnnnnnnnnnnnnnnnnnnnnnnnnnnnnnnnnnnnnnnnnnnnnnnnnnnnnnnnnnnnnnnnnnnnnnnnnnnnnnnnnnnnnnnnnnnnnnnnnnnnnnnnnnnnnnnnnnnnnnnnnnnnnnnnnnnnnnnnnnnnnnnnnnnnnnnnnnnnnnnnnnnnnnnnnnnnnnnnnnnnnnnnnnnnnnnnnnnnnnnnnnnnnnnnnnnnnnnnnnnnnnnnnnnnnnnnnnnnnnnnnnnnnnnnnnnnnnnnnnnnnnnnnnnnnnnnnnnnnnnnnnnnnnnnnnnnnnnnnnnnnnnnnnnnnnnnnnnnnnnnnnnnnnnnnnnnnnnnnnnnnnnnnnnnnnnnnnnnnnnnnnnnnnnnnnnnnnnnnnnnnnnnnnnnnnnnnnnnnnnnnnnnnnnnnnnnnnnnnnnnnnnnnnnnnnnnnnnnnnnnnnnnnnnnnnnnnnnnnnnnnnnnnnnnnnnnnnnnnnnnnnnnnnnnnnnnnnnnnnnnnnnnnnnnnnnnnnnnnnnnnnnnnnnnnnnnnnnnnnnnnnnnnnnnnnnnnnnnnnnnnnnnnnnnnnnnnnnnnnnnnnnnnnnnnnnnnnnnnnnnnnnnnnnnnnnnnnnnnnnnnnnnnnnnnnnnnnnnnnnnnnnnnnnnnnnnnnnnnnnnnnnnnnnnnnnnnnnnnnnnnnnnnnnnnnnnnnnnnnnnnnnnnnnnnnnnnnnnnnnnnnnnnnnnnnnnnnnnnnnnnnnnnnnnnnnnnnnnnnnnnnnnnnnnnnnnnnnnnnnnnnnnnnnnnnnnnnnnnnnnnnnnnnnnnnnnnnnnnnnnnnnnnnnnnnnnnnnnnnnnnnnnnnnnnnnnnnnnnnnnnnnnnnnnnnnnnnnnnnnnnnnnnnnnnnnnnnnnnnnnnnnnnnnnnnnnnnnnnnnnnnnnnnnnnnnnnnnnnnnnnnnnnnnnnnnnnnnnnnnnnnnnnnnnnnnnnnnnnnnnnnnnnnnnnnnnnnnnnnnnnnnnnnnnnnnnnnnnnnnnnnnnnnnnnnnnnnnnnnnnnnnnnnnnnnnnnnnnnnnnnnnnnnnnnnnnnnnnnnnnnnnnnnnnnnnnnnnnnnnnnnnnnnnnnnnnnnnnnnnnnnnnnnnnnnnnnnnnnnnnnnnnnnnnnnnnnnnnnnnnnnnnnnnnnnnnnnnnnnnnnnnnnnnnnnnnnnnnnnnnnnnnnnnnnnnnnnnnnnnnnnnnnnnnnnnnnnnnnnnnnnnnnnnnnnnnnnnnnnnnnnnnnnnnnnnnnnnnnnnnnnnnnnnnnnnnnnnnnnnnnnnnnnnnnnnnnnnnnnnnnnnnnnnnnnnnnnnnnnnnnnnnnnnnnnnnnnnnnnnnnnnnnnnnnnnnnnnnnnnnnnnnnnnnnnnnnnnnnnnnnnnnnnnnnnnnnnnnnnnnnnnnnnnnnnnnnnnnnnnnnnnnnnnnnnnnnnnnnnnnnnnnnnnnnnnnnnnnnnnnnnnnnnnnnnnnnnnnnnnnnnnnnnnnnnnnnnnnnnnnnnnnnnnnnnnnnnnnnnnnnnnnnnnnnnnnnnnnnnnnnnnnnnnnnnnnnnnnnnnnnnnnnnnnnnnnnnnnnnnnnnnnnnnnnnnnnnnnnnnnnnnnnnnnnnnnnnnnnnnnnnnnnnnnnnnnnnnnnnnnnnnnnnnnnnnnnnnnnnnnnnnnnnnnnnnnnnnnnnnnnnnnnnnnnnnnnnnnnnnnnnnnnnnnnnnnnnnnnnnnnnnnnnnnnnnnnnnnnnnnnnnnnnnnnnnnnnnnnnnnnnnnnnnnnnnnnnnnnnnnnnnnnnnnnnnnnnnnnnnnnnnnnnnnnnnnnnnnnnnnnnnnnnnnnnnnnnnnnnnnnnnnnnnnnnnnnnnnnnnnnnnnnnnnnnnnnnnnnnnnnnnnnnnnnnnnnnnnnnnnnnnnnnnnnnnnnnnnnnnnnnnnnnnnnnnnnnnnnnnnnnnnnnnnnnnnnnnnnnnnnnnnnnnnnnnnnnnnnnnnnnnnnnnnnnnnnnnnnnnnnnnnnnnnnnnnnnnnnnnnnnnnnnnnnnnnnnnnnnnnnnnnnnnnnnnnnnnnnnnnnnnnnnnnnnnnnnnnnnnnnnnnnnnnnnnnnnnnnnnnnnnnnnnnnnnnnnnnnnnnnnnnnnnnnnnnnnnnnnnnnnnnnnnnnnnnnnnnnnnnnnnnnnnnnnnnnnnnnnnnnnnnnnnnnnnnnnnnnnnnnnnnnnnnnnnnnnnnnnnnnnnnnnnnnnnnnnnnnnnnnnnnnnnnnnnnnnnnnnnnnnnnnnnnnnnnnnnnnnnnnnnnnnnnnnnnnnnnnnnnnnnnnnnnnnnnnnnnnnnnnnnnnnnnnnnnnnnnnnnnnnnnnnnnnnnnnnnnnnnnnnnnnnnnnnnnnnnnnnnnnnnnnnnnnnnnnnnnnnnnnnnnnnnnnnnnnnnnnnnnnnnnnnnnnnnnnnnnnnnnnnnnnnnnnnnnnnnnnnnnnnnnnnnnnnnnnnnnnnnnnnnnnnnnnnnnnnnnnnnnnnnnnnnnnnnnnnnnnnnnnnnnnnnnnnnnnnnnnnnnnnnnnnnnnnnnnnnnnnnnnnnnnnnnnnnnnnnnnnnnnnnnnnnnnnnnnnnnnnnnnnnnnnnnnnnnnnnnnnnnnnnnnnnnnnnnnnnnnnnnnnnnnnnnnnnnnnnnnnnnnnnnnnnnnnnnnnnnnnnnnnnnnnnnnnnnnnnnnnnnnnnnnnnnnnnnnnnnnnnnnnnnnnnnnnnnnnnnnnnnnnnnnnnnnnnnnnnnnnnnnnnnnnnnnnnnnnnnnnnnnnnnnnnnnnnnnnnnnnnnnnnnnnnnnnnnnnnnnnnnnnnnnnnnnnnnnnnnnnnnnnnnnnnnnnnnnnnnnnnnnnnnnnnnnnnnnnnnnnnnnnnnnnnnnnnnnnnnnnnnnnnnnnnnnnnnnnnnnnnnnnnnnnnnnnnnnnnnnnnnnnnnnnnnnnnnnnnnnnnnnnnnnnnnnnnnnnnnnnnnnnnnnnnnnnnnnnnnnnnnnnnnnnnnnnnnnnnnnnnnnnnnnnnnnnnnnnnnnnnnnnnnnnnnnnnnnnnnnnnnnnnnnnnnnnnnnnnnnnnnnnnnnnnnnnnnnnnnnnnnnnnnnnnnnnnnnnnnnnnnnnnnnnnnnnnnnnnnnnnnnnnnnnnnnnnnnnnnnnnnnnnnnnnnnnnnnnnnnnnnnnnnnnnnnnnnnnnnnnnnnnnnnnnnnnnnnnnnnnnnnnnnnnnnnnnnnnnnnnnnnnnnnnnnnnnnnnnnnnnnnnnnnnnnnnnnnnnnnnnnnnnnnnnnnnnnnnnnnnnnnnnnnnnnnnnnnnnnnnnnnnnnnnnnnnnnnnnnnnnnnnnnnnnnnnnnnnnnnnnnnnnnnnnnnnnnnnnnnnnnnnnnnnnnnnnnnnnnnnnnnnnnnnnnnnnnnnnnnnnnnnnnnnnnnnnnnnnnnnnnnnnnnnnnnnnnnnnnnnnnnnnnnnnnnnnnnnnnnnnnnnnnnnnnnnnnnnnnnnnnnnnnnnnnnnnnnnnnnnnnnnnnnnnnnnnnnnnnnnnnnnnnnnnnnnnnnnnnnnnnnnnnnnnnnnnnnnnnnnnnnnnnnnnnnnnnnnnnnnnnnnnnnnnnnnnnnnnnnnnnnnnnnnnnnnnnnnnnnnnnnnnnnnnnnnnnnnnnnnnnnnnnnnnnnnnnnnnnnnnnnnnnnnnnnnnnnnnnnnnnnnnnnnnnnnnnnnnnnnnnnnnnnnnnnnnnnnnnnnnnnnnnnnnnnnnnnnnnnnnnnnnnnnnnnnnnnnnnnnnnnnnnnnnnnnnnnnnnnnnnnnnnnnnnnnnnnnnnnnnnnnnnnnnnnnnnnnnnnnnnnnnnnnnnnnnnnnnnnnnnnnnnnnnnnnnnnnnnnnnnnnnnnnnnnnnnnnnnnnnnnnnnnnnnnnnnnnnnnnnnnnnnnnnnnnnnnnnnnnnnnnnnnnnnnnnnnnnnnnnnnnnnnnnnnnnnnnnnnnnnnnnnnnnnnnnnnnnnnnnnnnnnnnnnnnnnnnnnnnnnnnnnnnnnnnnnnnnnnnnnnnnnnnnnnnnnnnnnnnnnnnnnnnnnnnnnnnnnnnnnnnnnnnnnnnnnnnnnnnnnnnnnnnnnnnnnnnnnnnnnnnnnnnnnnnnnnnnnnnnnnnnnnnnnnnnnnnnnnnnnnnnnnnnnnnnnnnnnnnnnnnnnnnnnnnnnnnnnnnnnnnnnnnnnnnnnnnnnnnnnnnnnnnnnnnnnnnnnnnnnnnnnnnnnnnnnnnnnnnnnnnnnnnnnnnnnnnnnnnnnnnnnnnnnnnnnnnnnnnnnnnnnnnnnnnnnnnnnnnnnnnnnnnnnnnnnnnnnnnnnnnnnnnnnnnnnnnnnnnnnnnnnnnnnnnnnnnnnnnnnnnnnnnnnnnnnnnnnnnnnnnnnnnnnnnnnnnnnnnnnnnnnnnnnnnnnnnnnnnnnnnnnnnnnnnnnnnnnnnnnnnnnnnnnnnnnnnnnnnnnnnnnnnnnnnnnnnnnnnnnnnnnnnnnnnnnnnnnnnnnnnnnnnnnnnnnnnnnnnnnnnnnnnnnnnnnnnnnnnnnnnnnnnnnnnnnnnnnnnnnnnnnnnnnnnnnnnnnnnnnnnnnnnnnnnnnnnnnnnnnnnnnnnnnnnnnnnnnnnnnnnnnnnnnnnnnnnnnnnnnnnnnnnnnnnnnnnnnnnnnnnnnnnnnnnnnnnnnnnnnnnnnnnnnnnnnnnnnnnnnnnnnnnnnnnnnnnnnnnnnnnnnnnnnnnnnnnnnnnnnnnnnnnnnnnnnnnnnnnnnnnnnnnnnnnnnnnnnnnnnnnnnnnnnnnnnnnnnnnnnnnnnnnnnnnnnnnnnnnnnnnnnnnnnnnnnnnnnnnnnnnnnnnnnnnnnnnnnnnnnnnnnnnnnnnnnnnnnnnnnnnnnnnnnnnnnnnnnnnnnnnnnnnnnnnnnnnnnnnnnnnnnnnnnnnnnnnnnnnnnnnnnnnnnnnnnnnnnnnnnnnnnnnnnnnnnnnnnnnnnnnnnnnnnnnnnnnnnnnnnnnnnnnnnnnnnnnnnnnnnnnnnnnnnnnnnnnnnnnnnnnnnnnnnnnnnnnnnnnnnnnnnnnnnnnnnnnnnnnnnnnnnnnnnnnnnnnnnnnnnnnnnnnnnnnnnnnnnnnnnnnnnnnnnnnnnnnnnnnnnnnnnnnnnnnnnnnnnnnnnnnnnnnnnnnnnnnnnnnnnnnnnnnnnnnnnnnnnnnnnnnnnnnnnnnnnnnnnnnnnnnnnnnnnnnnnnnnnnnnnnnnnnnnnnnnnnnnnnnnnnnnnnnnnnnnnnnnnnnnnnnnnnnnnnnnnnnnnnnnnnnnnnnnnnnnnnnnnnnnnnnnnnnnnnnnnnnnnnnnnnnnnnnnnnnnnnnnnnnnnnnnnnnnnnnnnnnnnnnnnnnnnnnnnnnnnnnnnnnnnnnnnnnnnnnnnnnnnnnnnnnnnnnnnnnnnnnnnnnnnnnnnnnnnnnnnnnnnnnnnnnnnnnnnnnnnnnnnnnnnnnnnnnnnnnnnnnnnnnnnnnnnnnnnnnnnnnnnnnnnnnnnnnnnnnnnnnnnnnnnnnnnnnnnnnnnnnnnnnnnnnnnnnnnnnnnnnnnnnnnnnnnnnnnnnnnnnnnnnnnnnnnnnnnnnnnnnnnnnnnnnnnnnnnnnnnnnnnnnnnnnnnnnnnnnnnnnnnnnnnnnnnnnnnnnnnnnnnnnnnnnnnnnnnnnnnnnnnnnnnnnnnnnnnnnnnnnnnnnnnnnnnnnnnnnnnnnnnnnnnnnnnnnnnnnnnnnnnnnnnnnnnnnnnnnnnnnnnnnnnnnnnnnnnnnnnnnnnnnnnnnnnnnnnnnnnnnnnnnnnnnnnnnnnnnnnnnnnnnnnnnnnnnnnnnnnnnnnnnnnnnnnnnnnnnnnnnnnnnnnnnnnnnnnnnnnnnnnnnnnnnnnnnnnnnnnnnnnnnnnnnnnnnnnnnnnnnnnnnnnnnnnnnnnnnnnnnnnnnnnnnnnnnnnnnnnnnnnnnnnnnnnnnnnnnnnnnnnnnnnnnnnnnnnnnnnnnnnnnnnnnnnnnnnnnnnnnnnnnnnnnnnnnnnnnnnnnnnnnnnnnnnnnnnnnnnnnnnnnnnnnnnnnnnnnnnnnnnnnnnnnnnnnnnnnnnnnnnnnnnnnnnnnnnnnnnnnnnnnnnnnnnnnnnnnnnnnnnnnnnnnnnnnnnnnnnnnnnnnnnnnnnnnnnnnnnnnnnnnnnnnnnnnnnnnnnnnnnnnnnnnnnnnnnnnnnnnnnnnnnnnnnnnnnnnnnnnnnnnnnnnnnnnnnnnnnnnnnnnnnnnnnnnnnnnnnnnnnnnnnnnnnnnnnnnnnnnnnnnnnnnnnnnnnnnnnnnnnnnnnnnnnnnnnnnnnnnnnnnnnnnnnnnnnnnnnnnnnnnnnnnnnnnnnnnnnnnnnnnnnnnnnnnnnnnnnnnnnnnnnnnnnnnnnnnnnnnnnnnnnnnnnnnnnnnnnnnnnnnnnnnnnnnnnnnnnnnnnnnnnnnnnnnnnnnnnnnnnnnnnnnnnnnnnnnnnnnnnnnnnnnnnnnnnnnnnnnnnnnnnnnnnnnnnnnnnnnnnnnnnnnnnnnnnnnnnnnnnnnnnnnnnnnnnnnnnnnnnnnnnnnnnnnnnnnnnnnnnnnnnnnnnnnnnnnnnnnnnnnnnnnnnnnnnnnnnnnnnnnnnnnnnnnnnnnnnnnnnnnnnnnnnnnnnnnnnnnnnnnnnnnnnnnnnnnnnnnnnnnnnnnnnnnnnnnnnnnnnnnnnnnnnnnnnnnnnnnnnnnnnnnnnnnnnnnnnnnnnnnnnnnnnnnnnnnnnnnnnnnnnnnnnnnnnnnnnnnnnnnnnnnnnnnnnnnnnnnnnnnnnnnnnnnnnnnnnnnnnnnnnnnnnnnnnnnnnnnnnnnnnnnnnnnnnnnnnnnnnnnnnnnnnnnnnnnnnnnnnnnnnnnnnnnnnnnnnnnnnnnnnnnnnnnnnnnnnnnnnnnnnnnnnnnnnnnnnnnnnnnnnnnnnnnnnnnnnnnnnnnnnnnnnnnnnnnnnnnnnnnnnnnnnnnnnnnnnnnnnnnnnnnnnnnnnnnnnnnnnnnnnnnnnnnnnnnnnnnnnnnnnnnnnnnnnnnnnnnnnnnnnnnnnnnnnnnnnnnnnnnnnnnnnnnnnnnnnnnnnnnnnnnnnnnnnnnnnnnnnnnnnnnnnnnnnnnnnnnnnnnnnnnnnnnnnnnnnnnnnnnnnnnnnnnnnnnnnnnnnnnnnnnnnnnnnnnnnnnnnnnnnnnnnnnnnnnnnnnnnnnnnnnnnnnnnnnnnnnnnnnnnnnnnnnnnnnnnnnnnnnnnnnnnnnnnnnnnnnnnnnnnnnnnnnnnnnnnnnnnnnnnnnnnnnnnnnnnnnnnnnnnnnnnnnnnnnnnnnnnnnnnnnnnnnnnnnnnnnnnnnnnnnnnnnnnnnnnnnnnnnnnnnnnnnnnnnnnnnnnnnnnnnnnnnnnnnnnnnnnnnnnnnnnnnnnnnnnnnnnnnnnnnnnnnnnnnnnnnnnnnnnnnnnnnnnnnnnnnnnnnnnnnnnnnnnnnnnnnnnnnnnnnnnnnnnnnnnnnnnnnnnnnnnnnnnnnnnnnnnnnnnnnnnnnnnnnnnnnnnnnnnnnnnnnnnnnnnnnnnnnnnnnnnnnnnnnnnnnnnnnnnnnnnnnnnnnnnnnnnnnnnnnnnnnnnnnnnnnnnnnnnnnnnnnnnnnnnnnnnnnnnnnnnnnnnnnnnnnnnnnnnnnnnnnnnnnnnnnnnnnnnnnnnnnnnnnnnnnnnnnnnnnnnnnnnnnnnnnnnnnnnnnnnnnnnnnnnnnnnnnnnnnnnnnnnnnnnnnnnnnnnnnnnnnnnnnnnnnnnnnnnnnnnnnnnnnnnnnnnnnnnnnnnnnnnnnnnnnnnnnnnnnnnnnnnnnnnnnnnnnnnnnnnnnnnnnnnnnnnnnnnnnnnnnnnnnnnnnnnnnnnnnnnnnnnnnnnnnnnnnnnnnnnnnnnnnnnnnnnnnnnnnnnnnnnnnnnnnnnnnnnnnnnnnnnnnnnnnnnnnnnnnnnnnnnnnnnnnnnnnnnnnnnnnnnnnnnnnnnnnnnnnnnnnnnnnnnnnnnnnnnnnnnnnnnnnnnnnnnnnnnnnnnnnnnnnnnnnnnnnnnnnnnnnnnnnnnnnnnnnnnnnnnnnnnnnnnnnnnnnnnnnnnnnnnnnnnnnnnnnnnnnnnnnnnnnnnnnnnnnnnnnnnnnnnnnnnnnnnnnnnnnnnnnnnnnnnnnnnnnnnnnnnnnnnnnnnnnnnnnnnnnnnnnnnnnnnnnnnnnnnnnnnnnnnnnnnnnnnnnnnnnnnnnnnnnnnnnnnnnnnnnnnnnnnnnnnnnnnnnnnnnnnnnnnnnnnnnnnnnnnnnnnnnnnnnnnnnnnnnnnnnnnnnnnnnnnnnnnnnnnnnnnnnnnnnnnnnnnnnnnnnnnnnnnnnnnnnnnnnnnnnnnnnnnnnnnnnnnnnnnnnnnnnnnnnnnnnnnnnnnnnnnnnnnnnnnnnnnnnnnnnnnnnnnnnnnnnnnnnnnnnnnnnnnnnnnnnnnnnnnnnnnnnnnnnnnnnnnnnnnnnnnnnnnnnnnnnnnnnnnnnnnnnnnnnnnnnnnnnnnnnnnnnnnnnnnnnnnnnnnnnnnnnnnnnnnnnnnnnnnnnnnnnnnnnnnnnnnnnnnnnnnnnnnnnnnnnnnnnnnnnnnnnnnnnnnnnnnnnnnnnnnnnnnnnnnnnnnnnnnnnnnnnnnnnnnnnnnnnnnnnnnnnnnnnnnnnnnnnnnnnnnnnnnnnnnnnnnnnnnnnnnnnnnnnnnnnnnnnnnnnnnnnnnnnnnnnnnnnnnnnnnnnnnnnnnnnnnnnnnnnnnnnnnnnnnnnnnnnnnnnnnnnnnnnnnnnnnnnnnnnnnnnnnnnnnnnnnnnnnnnnnnnnnnnnnnnnnnnnnnnnnnnnnnnnnnnnnnnnnnnnnnnnnnnnnnnnnnnnnnnnnnnnnnnnnnnnnnnnnnnnnnnnnnnnnnnnnnnnnnnnnnnnnnnnnnnnnnnnnnnnnnnnnnnnnnnnnnnnnnnnnnnnnnnnnnnnnnnnnnnnnnnnnnnnnnnnnnnnnnnnnnnnnnnnnnnnnnnnnnnnnnnnnnnnnnnnnnnnnnnnnnnnnnnnnnnnnnnnnnnnnnnnnnnnnnnnnnnnnnnnnnnnnnnnnnnnnnnnnnnnnnnnnnnnnnnnnnnnnnnnnnnnnnnnnnnnnnnnnnnnnnnnnnnnnnnnnnnnnnnnnnnnnnnnnnnnnnnnnnnnnnnnnnnnnnnnnnnnnnnnnnnnnnnnnnnnnnnnnnnnnnnnnnnnnnnnnnnnnnnnnnnnnnnnnnnnnnnnnnnnnnnnnnnnnnnnnnnnnnnnnnnnnnnnnnnnnnnnnnnnnnnnnnnnnnnnnnnnnnnnnnnnnnnnnnnnnnnnnnnnnnnnnnnnnnnnnnnnnnnnnnnnnnnnnnnnnnnnnnnnnnnnnnnnnnnnnnnnnnnnnnnnnnnnnnnnnnnnnnnnnnnnnnnnnnnnnnnnnnnnnnnnnnnnnnnnnnnnnnnnnnnnnnnnnnnnnnnnnnnnnnnnnnnnnnnnnnnnnnnnnnnnnnnnnnnnnnnnnnnnnnnnnnnnnnnnnnnnnnnnnnnnnnnnnnnnnnnnnnnnnnnnnnnnnnnnnnnnnnnnnnnnnnnnnnnnnnnnnnnnnnnnnnnnnnnnnnnnnnnnnnnnnnnnnnnnnnnnnnnnnnnnnnnnnnnnnnnnnnnnnnnnnnnnnnnnnnnnnnnnnnnnnnnnnnnnnnnnnnnnnnnnnnnnnnnnnnnnnnnnnnnnnnnnnnnnnnnnnnnnnnnnnnnnnnnnnnnnnnnnnnnnnnnnnnnnnnnnnnnnnnnnnnnnnnnnnnnnnnnnnnnnnnnnnnnnnnnnnnnnnnnnnnnnnnnnnnnnnnnnnnnnnnnnnnnnnnnnnnnnnnnnnnnnnnnnnnnnnnnnnnnnnnnnnnnnnnnnnnnnnnnnnnnnnnnnnnnnnnnnnnnnnnnnnnnnnnnnnnnnnnnnnnnnnnnnnnnnnnnnnnnnnnnnnnnnnnnnnnnnnnnnnnnnnnnnnnnnnnnnnnnnnnnnnnnnnnnnnnnnnnnnnnnnnnnnnnnnnnnnnnnnnnnnnnnnnnnnnnnnnnnnnnnnnnnnnnnnnnnnnnnnnnnnnnnnnnnnnnnnnnnnnnnnnnnnnnnnnnnnnnnnnnnnnnnnnnnnnnnnnnnnnnnnnnnnnnnnnnnnnnnnnnnnnnnnnnnnnnnnnnnnnnnnnnnnnnnnnnnnnnnnnnnnnnnnnnnnnnnnnnnnnnnnnnnnnnnnnnnnnnnnnnnnnnnnnnnnnnnnnnnnnnnnnnnnnnnnnnnnnnnnnnnnnnnnnnnnnnnnnnnnnnnnnnnnnnnnnnnnnnnnnnnnnnnnnnnnnnnnnnnnnnnnnnnnnnnnnnnnnnnnnnnnnnnnnnnnnnnnnnnnnnnnnnnnnnnnnnnnnnnnnnnnnnnnnnnnnnnnnnnnnnnnnnnnnnnnnnnnnnnnnnnnnnnnnnnnnnnnnnnnnnnnnnnnnnnnnnnnnnnnnnnnnnnnnnnnnnnnnnnnnnnnnnnnnnnnnnnnnnnnnnnnnnnnnnnnnnnnnnnnnnnnnnnnnnnnnnnnnnnnnnnnnnnnnnnnnnnnnnnnnnnnnnnnnnnnnnnnnnnnnnnnnnnnnnnnnnnnnnnnnnnnnnnnnnnnnnnnnnnnnnnnnnnnnnnnnnnnnnnnnnnnnnnnnnnnnnnnnnnnnnnnnnnnnnnnnnnnnnnnnnnnnnnnnnnnnnnnnnnnnnnnnnnnnnnnnnnnnnnnnnnnnnnnnnnnnnnnnnnnnnnnnnnnnnnnnnnnnnnnnnnnnnnnnnnnnnnnnnnnnnnnnnnnnnnnnnnnnnnnnnnnnnnnnnnnnnnnnnnnnnnnnnnnnnnnnnnnnnnnnnnnnnnnnnnnnnnnnnnnnnnnnnnnnnnnnnnnnnnnnnnnnnnnnnnnnnnnnnnnnnnnnnnnnnnnnnnnnnnnnnnnnnnnnnnnnnnnnnnnnnnnnnnnnnnnnnnnnnnnnnnnnnnnnnnnnnnnnnnnnnnnnnnnnnnnnnnnnnnnnnnnnnnnnnnnnnnnnnnnnnnnnnnnnnnnnnnnnnnnnnnnnnnnnnnnnnnnnnnnnnnnnnnnnnnnnnnnnnnnnnnnnnnnnnnnnnnnnnnnnnnnnnnnnnnnnnnnnnnnnnnnnnnnnnnnnnnnnnnnnnnnnnnnnnnnnnnnnnnnnnnnnnnnnnnnnnnnnnnnnnnnnnnnnnnnnnnnnnnnnnnnnnnnnnnnnnnnnnnnnnnnnnnnnnnnnnnnnnnnnnnnnnnnnnnnnnnnnnnnnnnnnnnnnnnnnnnnnnnnnnnnnnnnnnnnnnnnnnnnnnnnnnnnnnnnnnnnnnnnnnnnnnnnnnnnnnnnnnnnnnnnnnnnnnnnnnnnnnnnnnnnnnnnnnnnnnnnnnnnnnnnnnnnnnnnnnnnnnnnnnnnnnnnnnnnnnnnnnnnnnnnnnnnnnnnnnnnnnnnnnnnnnnnnnnnnnnnnnnnnnnnnnnnnnnnnnnnnnnnnnnnnnnnnnnnnnnnnnnnnnnnnnnnnnnnnnnnnnnnnnnnnnnnnnnnnnnnnnnnnnnnnnnnnnnnnnnnnnnnnnnnnnnnnnnnnnnnnnnnnnnnnnnnnnnnnnnnnnnnnnnnnnnnnnnnnnnnnnnnnnnnnnnnnnnnnnnnnnnnnnnnnnnnnnnnnnnnnnnnnnnnnnnnnnnnnnnnnnnnnnnnnnnnnnnnnnnnnnnnnnnnnnnnnnnnnnnnnnnnnnnnnnnnnnnnnnnnnnnnnnnnnnnnnnnnnnnnnnnnnnnnnnnnnnnnnnnnnnnnnnnnnnnnnnnnnnnnnnnnnnnnnnnnnnnnnnnnnnnnnnnnnnnnnnnnnnnnnnnnnnnnnnnnnnnnnnnnnnnnnnnnnnnnnnnnnnnnnnnnnnnnnnnnnnnnnnnnnnnnnnnnnnnnnnnnnnnnnnnnnnnnnnnnnnnnnnnnnnnnnnnnnnnnnnnnnnnnnnnnnnnnnnnnnnnnnnnnnnnnnnnnnnnnnnnnnnnnnnnnnnnnnnnnnnnnnnnnnnnnnnnnnnnnnnnnnnnnnnnnnnnnnnnnnnnnnnnnnnnnnnnnnnnnnnnnnnnnnnnnnnnnnnnnnnnnnnnnnnnnnnnnnnnnnnnnnnnnnnnnnnnnnnnnnnnnnnnnnnnnnnnnnnnnnnnnnnnnnnnnnnnnnnnnnnnnnnnnnnnnnnnnnnnnnnnnnnnnnnnnnnnnnnnnnnnnnnnnnnnnnnnnnnnnnnnnnnnnnnnnnnnnnnnnnnnnnnnnnnnnnnnnnnnnnnnnnnnnnnnnnnnnnnnnnnnnnnnnnnnnnnnnnnnnnnnnnnnnnnnnnnnnnnnnnnnnnnnnnnnnnnnnnnnnnnnnnnnnnnnnnnnnnnnnnnnnnnnnnnnnnnnnnnnnnnnnnnnnnnnnnnnnnnnnnnnnnnnnnnnnnnnnnnnnnnnnnnnnnnnnnnnnnnnnnnnnnnnnnnnnnnnnnnnnnnnnnnnnnnnnnnnnnnnnnnnnnnnnnnnnnnnnnnnnnnnnnnnnnnnnnnnnnnnnnnnnnnnnnnnnnnnnnnnnnnnnnnnnnnnnnnnnnnnnnnnnnnnnnnnnnnnnnnnnnnnnnnnnnnnnnnnnnnnnnnnnnnnnnnnnnnnnnnnnnnnnnnnnnnnnnnnnnnnnnnnnnnnnnnnnnnnnnnnnnnnnnnnnnnnnnnnnnnnnnnnnnnnnnnnnnnnnnnnnnnnnnnnnnnnnnnnnnnnnnnnnnnnnnnnnnnnnnnnnnnnnnnnnnnnnnnnnnnnnnnnnnnnnnnnnnnnnnnnnnnnnnnnnnnnnnnnnnnnnnnnnnnnnnnnnnnnnnnnnnnnnnnnnnnnnnnnnnnnnnnnnnnnnnnnnnnnnnnnnnnnnnnnnnnnnnnnnnnnnnnnnnnnnnnnnnnnnnnnnnnnnnnnnnnnnnnnnnnnnnnnnnnnnnnnnnnnnnnnnnnnnnnnnnnnnnnnnnnnnnnnnnnnnnnnnnnnnnnnnnnnnnnnnnnnnnnnnnnnnnnnnnnnnnnnnnnnnnnnnnnnnnnnnnnnnnnnnnnnnnnnnnnnnnnnnnnnnnnnnnnnnnnnnnnnnnnnnnnnnnnnnnnnnnnnnnnnnnnnnnnnnnnnnnnnnnnnnnnnnnnnnnnnnnnnnnnnnnnnnnnnnnnnnnnnnnnnnnnnnnnnnnnnnnnnnnnnnnnnnnnnnnnnnnnnnnnnnnnnnnnnnnnnnnnnnnnnnnnnnnnnnnnnnnnnnnnnnnnnnnnnnnnnnnnnnnnnnnnnnnnnnnnnnnnnnnnnnnnnnnnnnnnnnnnnnnnnnnnnnnnnnnnnnnnnnnnnnnnnnnnnnnnnnnnnnnnnnnnnnnnnnnnnnnnnnnnnnnnnnnnnnnnnnnnnnnnnnnnnnnnnnnnnnnnnnnnnnnnnnnnnnnnnnnnnnnnnnnnnnnnnnnnnnnnnnnnnnnnnnnnnnnnnnnnnnnnnnnnnnnnnnnnnnnnnnnnnnnnnnnnnnnnnnnnnnnnnnnnnnnnnnnnnnnnnnnnnnnnnnnnnnnnnnnnnnnnnnnnnnnnnnnnnnnnnnnnnnnnnnnnnnnnnnnnnnnnnnnnnnnnnnnnnnnnnnnnnnnnnnnnnnnnnnnnnnnnnnnnnnnnnnnnnnnnnnnnnnnnnnnnnnnnnnnnnnnnnnnnnnnnnnnnnnnnnnnnnnnnnnnnnnnnnnnnnnnnnnnnnnnnnnnnnnnnnnnnnnnnnnnnnnnnnnnnnnnnnnnnnnnnnnnnnnnnnnnnnnnnnnnnnnnnnnnnnnnnnnnnnnnnnnnnnnnnnnnnnnnnnnnnnnnnnnnnnnnnnnnnnnnnnnnnnnnnnnnnnnnnnnnnnnnnnnnnnnnnnnnnnnnnnnnnnnnnnnnnnnnnnnnnnnnnnnnnnnnnnnnnnnnnnnnnnnnnnnnnnnnnnnnnnnnnnnnnnnnnnnnnnnnnnnnnnnnnnnnnnnnnnnnnnnnnnnnnnnnnnnnnnnnnnnnnnnnnnnnnnnnnnnnnnnnnnnnnnnnnnnnnnnnnnnnnnnnnnnnnnnnnnnnnnnnnnnnnnnnnnnnnnnnnnnnnnnnnnnnnnnnnnnnnnnnnnnnnnnnnnnnnnnnnnnnnnnnnnnnnnnnnnnnnnnnnnnnnnnnnnnnnnnnnnnnnnnnnnnnnnnnnnnnnnnnnnnnnnnnnnnnnnnnnnnnnnnnnnnnnnnnnnnnnnnnnnnnnnnnnnnnnnnnnnnnnnnnnnnnnnnnnnnnnnnnnnnnnnnnnnnnnnnnnnnnnnnnnnnnnnnnnnnnnnnnnnnnnnnnnnnnnnnnnnnnnnnnnnnnnnnnnnnnnnnnnnnnnnnnnnnnnnnnnnnnnnnnnnnnnnnnnnnnnnnnnnnnnnnnnnnnnnnnnnnnnnnnnnnnnnnnnnnnnnnnnnnnnnnnnnnnnnnnnnnnnnnnnnnnnnnnnnnnnnnnnnnnnnnnnnnnnnnnnnnnnnnnnnnnnnnnnnnnnnnnnnnnnnnnnnnnnnnnnnnnnnnnnnnnnnnnnnnnnnnnnnnnnnnnnnnnnnnnnnnnnnnnnnnnnnnnnnnnnnnnnnnnnnnnnnnnnnnnnnnnnnnnnnnnnnnnnnnnnnnnnnnnnnnnnnnnnnnnnnnnnnnnnnnnnnnnnnnnnnnnnnnnnnnnnnnnnnnnnnnnnnnnnnnnnnnnnnnnnnnnnnnnnnnnnnnnnnnnnnnnnnnnnnnnnnnnnnnnnnnnnnnnnnnnnnnnnnnnnnnnnnnnnnnnnnnnnnnnnnnnnnnnnnnnnnnnnnnnnnnnnnnnnnnnnnnnnnnnnnnnnnnnnnnnnnnnnnnnnnnnnnnnnnnnnnnnnnnnnnnnnnnnnnnnnnnnnnnnnnnnnnnnnnnnnnnnnnnnnnnnnnnnnnnnnnnnnnnnnnnnnnnnnnnnnnnnnnnnnnnnnnnnnnnnnnnnnnnnnnnnnnnnnnnnnnnnnnnnnnnnnnnnnnnnnnnnnnnnnnnnnnnnnnnnnnnnnnnnnnnnnnnnnnnnnnnnnnnnnnnnnnnnnnnnnnnnnnnnnnnnnnnnnnnnnnnnnnnnnnnnnnnnnnnnnnnnnnnnnnnnnnnnnnnnnnnnnnnnnnnnnnnnnnnnnnnnnnnnnnnnnnnnnnnnnnnnnnnnnnnnnnnnnnnnnnnnnnnnnnnnnnnnnnnnnnnnnnnnnnnnnnnnnnnnnnnnnnnnnnnnnnnnnnnnnnnnnnnnnnnnnnnnnnnnnnnnnnnnnnnnnnnnnnnnnnnnnnnnnnnnnnnnnnnnnnnnnnnnnnnnnnnnnnnnnnnnnnnnnnnnnnnnnnnnnnnnnnnnnnnnnnnnnnnnnnnnnnnnnnnnnnnnnnnnnnnnnnnnnnnnnnnnnnnnnnnnnnnnnnnnnnnnnnnnnnnnnnnnnnnnnnnnnnnnnnnnnnnnnnnnnnnnnnnnnnnnnnnnnnnnnnnnnnnnnnnnnnnnnnnnnnnnnnnnnnnnnnnnnnnnnnnnnnnnnnnnnnnnnnnnnnnnnnnnnnnnnnnnnnnnnnnnnnnnnnnnnnnnnnnnnnnnnnnnnnnnnnnnnnnnnnnnnnnnnnnnnnnnnnnnnnnnnnnnnnnnnnnnnnnnnnnnnnnnnnnnnnnnnnnnnnnnnnnnnnnnnnnnnnnnnnnnnnnnnnnnnnnnnnnnnnnnnnnnnnnnnnnnnnnnnnnnnnnnnnnnnnnnnnnnnnnnnnnnnnnnnnnnnnnnnnnnnnnnnnnnnnnnnnnnnnnnnnnnnnnnnnnnnnnnnnnnnnnnnnnnnnnnnnnnnnnnnnnnnnnnnnnnnnnnnnnnnnnnnnnnnnnnnnnnnnnnnnnnnnnnnnnnnnnnnnnnnnnnnnnnnnnnnnnnnnnnnnnnnnnnnnnnnnnnnnnnnnnnnnnnnnnnnnnnnnnnnnnnnnnnnnnnnnnnnnnnnnnnnnnnnnnnnnnnnnnnnnnnnnnnnnnnnnnnnnnnnnnnnnnnnnnnnnnnnnnnnnnnnnnnnnnnnnnnnnnnnnnnnnnnnnnnnnnnnnnnnnnnnnnnnnnnnnnnnnnnnnnnnnnnnnnnnnnnnnnnnnnnnnnnnnnnnnnnnnnnnnnnnnnnnnnnnnnnnnnnnnnnnnnnnnnnnnnnnnnnnnnnnnnnnnnnnnnnnnnnnnnnnnnnnnnnnnnnnnnnnnnnnnnnnnnnnnnnnnnnnnnnnnnnnnnnnnnnnnnnnnnnnnnnnnnnnnnnnnnnnnnnnnnnnnnnnnnnnnnnnnnnnnnnnnnnnnnnnnnnnnnnnnnnnnnnnnnnnnnnnnnnnnnnnnnnnnnnnnnnnnnnnnnnnnnnnnnnnnnnnnnnnnnnnnnnnnnnnnnnnnnnnnnnnnnnnnnnnnnnnnnnnnnnnnnnnnnnnnnnnnnnnnnnnnnnnnnnnnnnnnnnnnnnnnnnnnnnnnnnnnnnnnnnnnnnnnnnnnnnnnnnnnnnnnnnnnnnnnnnnnnnnnnnnnnnnnnnnnnnnnnnnnnnnnnnnnnnnnnnnnnnnnnnnnnnnnnnnnnnnnnnnnnnnnnnnnnnnnnnnnnnnnnnnnnnnnnnnnnnnnnnnnnnnnnnnnnnnnnnnnnnnnnnnnnnnnnnnnnnnnnnnnnnnnnnnnnnnnnnnnnnnnnnnnnnnnnnnnnnnnnnnnnnnnnnnnnnnnnnnnnnnnnnnnnnnnnnnnnnnnnnnnnnnnnnnnnnnnnnnnnnnnnnnnnnnnnnnnnnnnnnnnnnnnnnnnnnnnnnnnnnnnnnnnnnnnnnnnnnnnnnnnnnnnnnnnnnnnnnnnnnnnnnnnnnnnnnnnnnnnnnnnnnnnnnnnnnnnnnnnnnnnnnnnnnnnnnnnnnnnnnnnnnnnnnnnnnnnnnnnnnnnnnnnnnnnnnnnnnnnnnnnnnnnnnnnnnnnnnnnnnnnnnnnnnnnnnnnnnnnnnnnnnnnnnnnnnnnnnnnnnnnnnnnnnnnnnnnnnnnnnnnnnnnnnnnnnnnnnnnnnnnnnnnnnnnnnnnnnnnnnnnnnnnnnnnnnnnnnnnnnnnnnnnnnnnnnnnnnnnnnnnnnnnnnnnnnnnnnnnnnnnnnnnnnnnnnnnnnnnnnnnnnnnnnnnnnnnnnnnnnnnnnnnnnnnnnnnnnnnnnnnnnnnnnnnnnnnnnnnnnnnnnnnnnnnnnnnnnnnnnnnnnnnnnnnnnnnnnnnnnnnnnnnnnnnnnnnnnnnnnnnnnnnnnnnnnnnnnnnnnnnnnnnnnnnnnnnnnnnnnnnnnnnnnnnnnnnnnnnnnnnnnnnnnnnnnnnnnnnnnnnnnnnnnnnnnnnnnnnnnnnnnnnnnnnnnnnnnnnnnnnnnnnnnnnnnnnnnnnnnnnnnnnnnnnnnnnnnnnnnnnnnnnnnnnnnnnnnnnnnnnnnnnnnnnnnnnnnnnnnnnnnnnnnnnnnnnnnnnnnnnnnnnnnnnnnnnnnnnnnnnnnnnnnnnnnnnnnnnnnnnnnnnnnnnnnnnnnnnnnnnnnnnnnnnnnnnnnnnnnnnnnnnnnnnnnnnnnnnnnnnnnnnnnnnnnnnnnnnnnnnnnnnnnnnnnnnnnnnnnnnnnnnnnnnnnnnnnnnnnnnnnnnnnnnnnnnnnnnnnnnnnnnnnnnnnnnnnnnnnnnnnnnnnnnnnnnnnnnnnnnnnnnnnnnnnnnnnnnnnnnnnnnnnnnnnnnnnnnnnnnnnnnnnnnnnnnnnnnnnnnnnnnnnnnnnnnnnnnnnnnnnnnnnnnnnnnnnnnnnnnnnnnnnnnnnnnnnnnnnnnnnnnnnnnnnnnnnnnnnnnnnnnnnnnnnnnnnnnnnnnnnnnnnnnnnnnnnnnnnnnnnnnnnnnnnnnnnnnnnnnnnnnnnnnnnnnnnnnnnnnnnnnnnnnnnnnnnnnnnnnnnnnnnnnnnnnnnnnnnnnnnnnnnnnnnnnnnnnnnnnnnnnnnnnnnnnnnnnnnnnnnnnnnnnnnnnnnnnnnnnnnnnnnnnnnnnnnnnnnnnnnnnnnnnnnnnnnnnnnnnnnnnnnnnnnnnnnnnnnnnnnnnnnnnnnnnnnnnnnnnnnnnnnnnnnnnnnnnnnnnnnnnnnnnnnnnnnnnnnnnnnnnnnnnnnnnnnnnnnnnnnnnnnnnnnnnnnnnnnnnnnnnnnnnnnnnnnnnnnnnnnnnnnnnnnnnnnnnnnnnnnnnnnnnnnnnnnnnnnnnnnnnnnnnnnnnnnnnnnnnnnnnnnnnnnnnnnnnnnnnnnnnnnnnnnnnnnnnnnnnnnnnnnnnnnnnnnnnnnnnnnnnnnnnnnnnnnnnnnnnnnnnnnnnnnnnnnnnnnnnnnnnnnnnnnnnnnnnnnnnnnnnnnnnnnnnnnnnnnnnnnnnnnnnnnnnnnnnnnnnnnnnnnnnnnnnnnnnnnnnnnnnnnnnnnnnnnnnnnnnnnnnnnnnnnnnnnnnnnnnnnnnnnnnnnnnnnnnnnnnnnnnnnnnnnnnnnnnnnnnnnnnnnnnnnnnnnnnnnnnnnnnnnnnnnnnnnnnnnnnnnnnnnnnnnnnnnnnnnnnnnnnnnnnnnnnnnnnnnnnnnnnnnnnnnnnnnnnnnnnnnnnnnnnnnnnnnnnnnnnnnnnnnnnnnnnnnnnnnnnnnnnnnnnnnnnnnnnnnnnnnnnnnnnnnnnnnnnnnnnnnnnnnnnnnnnnnnnnnnnnnnnnnnnnnnnnnnnnnnnnnnnnnnnnnnnnnnnnnnnnnnnnnnnnnnnnnnnnnnnnnnnnnnnnnnnnnnnnnnnnnnnnnnnnnnnnnnnnnnnnnnnnnnnnnnnnnnnnnnnnnnnnnnnnnnnnnnnnnnnnnnnnnnnnnnnnnnnnnnnnnnnnnnnnnnnnnnnnnnnnnnnnnnnnnnnnnnnnnnnnnnnnnnnnnnnnnnnnnnnnnnnnnnnnnnnnnnnnnnnnnnnnnnnnnnnnnnnnnnnnnnnnnnnnnnnnnnnnnnnnnnnnnnnnnnnnnnnnnnnnnnnnnnnnnnnnnnnnnnnnnnnnnnnnnnnnnnnnnnnnnnnnnnnnnnnnnnnnnnnnnnnnnnnnnnnnnnnnnnnnnnnnnnnnnnnnnnnnnnnnnnnnnnnnnnnnnnnnnnnnnnnnnnnnnnnnnnnnnnnnnnnnnnnnnnnnnnnnnnnnnnnnnnnnnnnnnnnnnnnnnnnnnnnnnnnnnnnnnnnnnnnnnnnnnnnnnnnnnnnnnnnnnnnnnnnnnnnnnnnnnnnnnnnnnnnnnnnnnnnnnnnnnnnnnnnnnnnnnnnnnnnnnnnnnnnnnnnnnnnnnnnnnnnnnnnnnnnnnnnnnnnnnnnnnnnnnnnnnnnnnnnnnnnnnnnnnnnnnnnnnnnnnnnnnnnnnnnnnnnnnnnnnnnnnnnnnnnnnnnnnnnnnnnnnnnnnnnnnnnnnnnnnnnnnnnnnnnnnnnnnnnnnnnnnnnnnnnnnnnnnnnnnnnnnnnnnnnnnnnnnnnnnnnnnnnnnnnnnnnnnnnnnnnnnnnnnnnnnnnnnnnnnnnnnnnnnnnnnnnnnnnnnnnnnnnnnnnnnnnnnnnnnnnnnnnnnnnnnnnnnnnnnnnnnnnnnnnnnnnnnnnnnnnnnnnnnnnnnnnnnnnnnnnnnnnnnnnnnnnnnnnnnnnnnnnnnnnnnnnnnnnnnnnnnnnnnnnnnnnnnnnnnnnnnnnnnnnnnnnnnnnnnnnnnnnnnnnnnnnnnnnnnnnnnnnnnnnnnnnnnnnnnnnnnnnnnnnnnnnnnnnnnnnnnnnnnnnnnnnnnnnnnnnnnnnnnnnnnnnnnnnnnnnnnnnnnnnnnnnnnnnnnnnnnnnnnnnnnnnnnnnnnnnnnnnnnnnnnnnnnnnnnnnnnnnnnnnnnnnnnnnnnnnnnnnnnnnnnnnnnnnnnnnnnnnnnnnnnnnnnnnnnnnnnnnnnnnnnnnnnnnnnnnnnnnnnnnnnnnnnnnnnnnnnnnnnnnnnnnnnnnnnnnnnnnnnnnnnnnnnnnnnnnnnnnnnnnnnnnnnnnnnnnnnnnnnnnnnnnnnnnnnnnnnnnnnnnnnnnnnnnnnnnnnnnnnnnnnnnnnnnnnnnnnnnnnnnnnnnnnnnnnnnnnnnnnnnnnnnnnnnnnnnnnnnnnnnnnnnnnnnnnnnnnnnnnnnnnnnnnnnnnnnnnnnnnnnnnnnnnnnnnnnnnnnnnnnnnnnnnnnnnnnnnnnnnnnnnnnnnnnnnnnnnnnnnnnnnnnnnnnnnnnnnnnnnnnnnnnnnnnnnnnnnnnnnnnnnnnnnnnnnnnnnnnnnnnnnnnnnnnnnnnnnnnnnnnnnnnnnnnnnnnnnnnnnnnnnnnnnnnnnnnnnnnnnnnnnnnnnnnnnnnnnnnnnnnnnnnnnnnnnnnnnnnnnnnnnnnnnnnnnnnnnnnnnnnnnnnnnnnnnnnnnnnnnnnnnnnnnnnnnnnnnnnnnnnnnnnnnnnnnnnnnnnnnnnnnnnnnnnnnnnnnnnnnnnnnnnnnnnnnnnnnnnnnnnnnnnnnnnnnnnnnnnnnnnnnnnnnnnnnnnnnnnnnnnnnnnnnnnnnnnnnnnnnnnnnnnnnnnnnnnnnnnnnnnnnnnnnnnnnnnnnnnnnnnnnnnnnnnnnnnnnnnnnnnnnnnnnnnnnnnnnnnnnnnnnnnnnnnnnnnnnnnnnnnnnnnnnnnnnnnnnnnnnnnnnnnnnnnnnnnnnnnnnnnnnnnnnnnnnnnnnnnnnnnnnnnnnnnnnnnnnnnnnnnnnnnnnnnnnnnnnnnnnnnnnnnnnnnnnnnnnnnnnnnnnnnnnnnnnnnnnnnnnnnnnnnnnnnnnnnnnnnnnnnnnnnnnnnnnnnnnnnnnnnnnnnnnnnnnnnnnnnnnnnnnnnnnnnnnnnnnnnnnnnnnnnnnnnnnnnnnnnnnnnnnnnnnnnnnnnnnnnnnnnnnnnnnnnnnnnnnnnnnnnnnnnnnnnnnnnnnnnnnnnnnnnnnnnnnnnnnnnnnnnnnnnnnnnnnnnnnnnnnnnnnnnnnnnnnnnnnnnnnnnnnnnnnnnnnnnnnnnnnnnnnnnnnnnnnnnnnnnnnnnnnnnnnnnnnnnnnnnnnnnnnnnnnnnnnnnnnnnnnnnnnnnnnnnnnnnnnnnnnnnnnnnnnnnnnnnnnnnnnnnnnnnnnnnnnnnnnnnnnnnnnnnnnnnnnnnnnnnnnnnnnnnnnnnnnnnnnnnnnnnnnnnnnnnnnnnnnnnnnnnnnnnnnnnnnnnnnnnnnnnnnnnnnnnnnnnnnnnnnnnnnnnnnnnnnnnnnnnnnnnnnnnnnnnnnnnnnnnnnnnnnnnnnnnnnnnnnnnnnnnnnnnnnnnnnnnnnnnnnnnnnnnnnnnnnnnnnnnnnnnnnnnnnnnnnnnnnnnnnnnnnnnnnnnnnnnnnnnnnnnnnnnnnnnnnnnnnnnnnnnnnnnnnnnnnnnnnnnnnnnnnnnnnnnnnnnnnnnnnnnnnnnnnnnnnnnnnnnnnnnnnnnnnnnnnnnnnnnnnnnnnnnnnnnnnnnnnnnnnnnnnnnnnnnnnnnnnnnnnnnnnnnnnnnnnnnnnnnnnnnnnnnnnnnnnnnnnnnnnnnnnnnnnnnnnnnnnnnnnnnnnnnnnnnnnnnnnnnnnnnnnnnnnnnnnnnnnnnnnnnnnnnnnnnnnnnnnnnnnnnnnnnnnnnnnnnnnnnnnnnnnnnnnnnnnnnnnnnnnnnnnnnnnnnnnnnnnnnnnnnnnnnnnnnnnnnnnnnnnnnnnnnnnnnnnnnnnnnnnnnnnnnnnnnnnnnnnnnnnnnnnnnnnnnnnnnnnnnnnnnnnnnnnnnnnnnnnnnnnnnnnnnnnnnnnnnnnnnnnnnnnnnnnnnnnnnnnnnnnnnnnnnnnnnnnnnnnnnnnnnnnnnnnnnnnnnnnnnnnnnnnnnnnnnnnnnnnnnnnnnnnnnnnnnnnnnnnnnnnnnnnnnnnnnnnnnnnnnnnnnnnnnnnnnnnnnnnnnnnnnnnnnnnnnnnnnnnnnnnnnnnnnnnnnnnnnnnnnnnnnnnnnnnnnnnnnnnnnnnnnnnnnnnnnnnnnnnnnnnnnnnnnnnnnnnnnnnnnnnnnnnnnnnnnnnnnnnnnnnnnnnnnnnnnnnnnnnnnnnnnnnnnnnnnnnnnnnnnnnnnnnnnnnnnnnnnnnnnnnnnnnnnnnnnnnnnnnnnnnnnnnnnnnnnnnnnnnnnnnnnnnnnnnnnnnnnnnnnnnnnnnnnnnnnnnnnnnnnnnnnnnnnnnnnnnnnnnnnnnnnnnnnnnnnnnnnnnnnnnnnnnnnnnnnnnnnnnnnnnnnnnnnnnnnnnnnnnnnnnnnnnnnnnnnnnnnnnnnnnnnnnnnnnnnnnnnnnnnnnnnnnnnnnnnnnnnnnnnnnnnnnnnnnnnnnnnnnnnnnnnnnnnnnnnnnnnnnnnnnnnnnnnnnnnnnnnnnnnnnnnnnnnnnnnnnnnnnnnnnnnnnnnnnnnnnnnnnnnnnnnnnnnnnnnnnnnnnnnnnnnnnnnnnnnnnnnnnnnnnnnnnnnnnnnnnnnnnnnnnnnnnnnnnnnnnnnnnnnnnnnnnnnnnnnnnnnnnnnnnnnnnnnnnnnnnnnnnnnnnnnnnnnnnnnnnnnnnnnnnnnnnnnnnnnnnnnnnnnnnnnnnnnnnnnnnnnnnnnnnnnnnnnnnnnnnnnnnnnnnnnnnnnnnnnnnnnnnnnnnnnnnnnnnnnnnnnnnnnnnnnnnnnnnnnnnnnnnnnnnnnnnnnnnnnnnnnnnnnnnnnnnnnnnnnnnnnnnnnnnnnnnnnnnnnnnnnnnnnnnnnnnnnnnnnnnnnnnnnnnnnnnnnnnnnnnnnnnnnnnnnnnnnnnnnnnnnnnnnnnnnnnnnnnnnnnnnnnnnnnnnnnnnnnnnnnnnnnnnnnnnnnnnnnnnnnnnnnnnnnnnnnnnnnnnnnnnnnnnnnnnnnnnnnnnnnnnnnnnnnnnnnnnnnnnnnnnnnnnnnnnnnnnnnnnnnnnnnnnnnnnnnnnnnnnnnnnnnnnnnnnnnnnnnnnnnnnnnnnnnnnnnnnnnnnnnnnnnnnnnnnnnnnnnnnnnnnnnnnnnnnnnnnnnnnnnnnnnnnnnnnnnnnnnnnnnnnnnnnnnnnnnnnnnnnnnnnnnnnnnnnnnnnnnnnnnnnnnnnnnnnnnnnnnnnnnnnnnnnnnnnnnnnnnnnnnnnnnnnnnnnnnnnnnnnnnnnnnnnnnnnnnnnnnnnnnnnnnnnnnnnnnnnnnnnnnnnnnnnnnnnnnnnnnnnnnnnnnnnnnnnnnnnnnnnnnnnnnnnnnnnnnnnnnnnnnnnnnnnnnnnnnnnnnnnnnnnnnnnnnnnnnnnnnnnnnnnnnnnnnnnnnnnnnnnnnnnnnnnnnnnnnnnnnnnnnnnnnnnnnnnnnnnnnnnnnnnnnnnnnnnnnnnnnnnnnnnnnnnnnnnnnnnnnnnnnnnnnnnnnnnnnnnnnnnnnnnnnnnnnnnnnnnnnnnnnnnnnnnnnnnnnnnnnnnnnnnnnnnnnnnnnnnnnnnnnnnnnnnnnnnnnnnnnnnnnnnnnnnnnnnnnnnnnnnnnnnnnnnnnnnnnnnnnnnnnnnnnnnnnnnnnnnnnnnnnnnnnnnnnnnnnnnnnnnnnnnnnnnnnnnnnnnnnnnnnnnnnnnnnnnnnnnnnnnnnnnnnnnnnnnnnnnnnnnnnnnnnnnnnnnnnnnnnnnnnnnnnnnnnnnnnnnnnnnnnnnnnnnnnnnnnnnnnnnnnnnnnnnnnnnnnnnnnnnnnnnnnnnnnnnnnnnnnnnnnnnnnnnnnnnnnnnnnnnnnnnnnnnnnnnnnnnnnnnnnnnnnnnnnnnnnnnnnnnnnnnnnnnnnnnnnnnnnnnnnnnnnnnnnnnnnnnnnnnnnnnnnnnnnnnnnnnnnnnnnnnnnnnnnnnnnnnnnnnnnnnnnnnnnnnnnnnnnnnnnnnnnnnnnnnnnnnnnnnnnnnnnnnnnnnnnnnnnnnnnnnnnnnnnnnnnnnnnnnnnnnnnnnnnnnnnnnnnnnnnnnnnnnnnnnnnnnnnnnnnnnnnnnnnnnnnnnnnnnnnnnnnnnnnnnnnnnnnnnnnnnnnnnnnnnnnnnnnnnnnnnnnnnnnnnnnnnnnnnnnnnnnnnnnnnnnnnnnnnnnnnnnnnnnnnnnnnnnnnnnnnnnnnnnnnnnnnnnnnnnnnnnnnnnnnnnnnnnnnnnnnnnnnnnnnnnnnnnnnnnnnnnnnnnnnnnnnnnnnnnnnnnnnnnnnnnnnnnnnnnnnnnnnnnnnnnnnnnnnnnnnnnnnnnnnnnnnnnnnnnnnnnnnnnnnnnnnnnnnnnnnnnnnnnnnnnnnnnnnnnnnnnnnnnnnnnnnnnnnnnnnnnnnnnnnnnnnnnnnnnnnnnnnnnnnnnnnnnnnnnnnnnnnnnnnnnnnnnnnnnnnnnnnnnnnnnnnnnnnnnnnnnnnnnnnnnnnnnnnnnnnnnnnnnnnnnnnnnnnnnnnnnnnnnnnnnnnnnnnnnnnnnnnnnnnnnnnnnnnnnnnnnnnnnnnnnnnnnnnnnnnnnnnnnnnnnnnnnnnnnnnnnnnnnnnnnnnnnnnnnnnnnnnnnnnnnnnnnnnnnnnnnnnnnnnnnnnnnnnnnnnnnnnnnnnnnnnnnnnnnnnnnnnnnnnnnnnnnnnnnnnnnnnnnnnnnnnnnnnnnnnnnnnnnnnnnnnnnnnnnnnnnnnnnnnnnnnnnnnnnnnnnnnnnnnnnnnnnnnnnnnnnnnnnnnnnnnnnnnnnnnnnnnnnnnnnnnnnnnnnnnnnnnnnnnnnnnnnnnnnnnnnnnnnnnnnnnnnnnnnnnnnnnnnnnnnnnnnnnnnnnnnnnnnnnnnnnnnnnnnnnnnnnnnnnnnnnnnnnnnnnnnnnnnnnnnnnnnnnnnnnnnnnnnnnnnnnnnnnnnnnnnnnnnnnnnnnnnnnnnnnnnnnnnnnnnnnnnnnnnnnnnnnnnnnnnnnnnnnnnnnnnnnnnnnnnnnnnnnnnnnnnnnnnnnnnnnnnnnnnnnnnnnnnnnnnnnnnnnnnnnnnnnnnnnnnnnnnnnnnnnnnnnnnnnnnnnnnnnnnnnnnnnnnnnnnnnnnnnnnnnnnnnnnnnnnnnnnnnnnnnnnnnnnnnnnnnnnnnnnnnnnnnnnnnnnnnnnnnnnnnnnnnnnnnnnnnnnnnnnnnnnnnnnnnnnnnnnnnnnnnnnnnnnnnnnnnnnnnnnnnnnnnnnnnnnnnnnnnnnnnnnnnnnnnnnnnnnnnnnnnnnnnnnnnnnnnnnnnnnnnnnnnnnnnnnnnnnnnnnnnnnnnnnnnnnnnnnnnnnnnnnnnnnnnnnnnnnnnnnnnnnnnnnnnnnnnnnnnnnnnnnnnnnnnnnnnnnnnnnnnnnnnnnnnnnnnnnnnnnnnnnnnnnnnnnnnnnnnnnnnnnnnnnnnnnnnnnnnnnnnnnnnnnnnnnnnnnnnnnnnnnnnnnnnnnnnnnnnnnnnnnnnnnnnnnnnnnnnnnnnnnnnnnnnnnnnnnnnnnnnnnnnnnnnnnnnnnnnnnnnnnnnnnnnnnnnnnnnnnnnnnnnnnnnnnnnnnnnnnnnnnnnnnnnnnnnnnnnnnnnnnnnnnnnnnnnnnnnnnnnnnnnnnnnnnnnnnnnnnnnnnnnnnnnnnnnnnnnnnnnnnnnnnnnnnnnnnnnnnnnnnnnnnnnnnnnnnnnnnnnnnnnnnnnnnnnnnnnnnnnnnnnnnnnnnnnnnnnnnnnnnnnnnnnnnnnnnnnnnnnnnnnnnnnnnnnnnnnnnnnnnnnnnnnnnnnnnnnnnnnnnnnnnnnnnnnnnnnnnnnnnnnnnnnnnnnnnnnnnnnnnnnnnnnnnnnnnnnnnnnnnnnnnnnnnnnnnnnnnnnnnnnnnnnnnnnnnnnnnnnnnnnnnnnnnnnnnnnnnnnnnnnnnnnnnnnnnnnnnnnnnnnnnnnnnnnnnnnnnnnnnnnnnnnnnnnnnnnnnnnnnnnnnnnnnnnnnnnnnnnnnnnnnnnnnnnnnnnnnnnnnnnnnnnnnnnnnnnnnnnnnnnnnnnnnnnnnnnnnnnnnnnnnnnnnnnnnnnnnnnnnnnnnnnnnnnnnnnnnnnnnnnnnnnnnnnnnnnnnnnnnnnnnnnnnnnnnnnnnnnnnnnnnnnnnnnnnnnnnnnnnnnnnnnnnnnnnnnnnnnnnnnnnnnnnnnnnnnnnnnnnnnnnnnnnnnnnnnnnnnnnnnnnnnnnnnnnnnnnnnnnnnnnnnnnnnnnnnnnnnnnnnnnnnnnnnnnnnnnnnnnnnnnnnnnnnnnnnnnnnnnnnnnnnnnnnnnnnnnnnnnnnnnnnnnnnnnnnnnnnnnnnnnnnnnnnnnnnnnnnnnnnnnnnnnnnnnnnnnnnnnnnnnnnnnnnnnnnnnnnnnnnnnnnnnnnnnnnnnnnnnnnnnnnnnnnnnnnnnnnnnnnnnnnnnnnnnnnnnnnnnnnnnnnnnnnnnnnnnnnnnnnnnnnnnnnnnnnnnnnnnnnnnnnnnnnnnnnnnnnnnnnnnnnnnnnnnnnnnnnnnnnnnnnnnnnnnnnnnnnnnnnnnnnnnnnnnnnnnnnnnnnnnnnnnnnnnnnnnnnnnnnnnnnnnnnnnnnnnnnnnnnnnnnnnnnnnnnnnnnnnnnnnnnnnnnnnnnnnnnnnnnnnnnnnnnnnnnnnnnnnnnnnnnnnnnnnnnnnnnnnnnnnnnnnnnnnnnnnnnnnnnnnnnnnnnnnnnnnnnnnnnnnnnnnnnnnnnnnnnnnnnnnnnnnnnnnnnnnnnnnnnnnnnnnnnnnnnnnnnnnnnnnnnnnnnnnnnnnnnnnnnnnnnnnnnnnnnnnnnnnnnnnnnnnnnnnnnnnnnnnnnnnnnnnnnnnnnnnnnnnnnnnnnnnnnnnnnnnnnnnnnnnnnnnnnnnnnnnnnnnnnnnnnnnnnnnnnnnnnnnnnnnnnnnnnnnnnnnnnnnnnnnnnnnnnnnnnnnnnnnnnnnnnnnnnnnnnnnnnnnnnnnnnnnnnnnnnnnnnnnnnnnnnnnnnnnnnnnnnnnnnnnnnnnnnnnnnnnnnnnnnnnnnnnnnnnnnnnnnnnnnnnnnnnnnnnnnnnnnnnnnnnnnnnnnnnnnnnnnnnnnnnnnnnnnnnnnnnnnnnnnnnnnnnnnnnnnnnnnnnnnnnnnnnnnnnnnnnnnnnnnnnnnnnnnnnnnnnnnnnnnnnnnnnnnnnnnnnnnnnnnnnnnnnnnnnnnnnnnnnnnnnnnnnnnnnnnnnnnnnnnnnnnnnnnnnnnnnnnnnnnnnnnnnnnnnnnnnnnnnnnnnnnnnnnnnnnnnnnnnnnnnnnnnnnnnnnnnnnnnnnnnnnnnnnnnnnnnnnnnnnnnnnnnnnnnnnnnnnnnnnnnnnnnnnnnnnnnnnnnnnnnnnnnnnnnnnnnnnnnnnnnnnnnnnnnnnnnnnnnnnnnnnnnnnnnnnnnnnnnnnnnnnnnnnnnnnnnnnnnnnnnnnnnnnnnnnnnnnnnnnnnnnnnnnnnnnnnnnnnnnnnnnnnnnnnnnnnnnnnnnnnnnnnnnnnnnnnnnnnnnnnnnnnnnnnnnnnnnnnnnnnnnnnnnnnnnnnnnnnnnnnnnnnnnnnnnnnnnnnnnnnnnnnnnnnnnnnnnnnnnnnnnnnnnnnnnnnnnnnnnnnnnnnnnnnnnnnnnnnnnnnnnnnnnnnnnnnnnnnnnnnnnnnnnnnnnnnnnnnnnnnnnnnnnnnnnnnnnnnnnnnnnnnnnnnnnnnnnnnnnnnnnnnnnnnnnnnnnnnnnnnnnnnnnnnnnnnnnnnnnnnnnnnnnnnnnnnnnnnnnnnnnnnnnnnnnnnnnnnnnnnnnnnnnnnnnnnnnnnnnnnnnnnnnnnnnnnnnnnnnnnnnnnnnnnnnnnnnnnnnnnnnnnnnnnnnnnnnnnnnnnnnnnnnnnnnnnnnnnnnnnnnnnnnnnnnnnnnnnnnnnnnnnnnnnnnnnnnnnnnnnnnnnnnnnnnnnnnnnnnnnnnnnnnnnnnnnnnnnnnnnnnnnnnnnnnnnnnnnnnnnnnnnnnnnnnnnnnnnnnnnnnnnnnnnnnnnnnnnnnnnnnnnnnnnnnnnnnnnnnnnnnnnnnnnnnnnnnnnnnnnnnnnnnnnnnnnnnnnnnnnnnnnnnnnnnnnnnnnnnnnnnnnnnnnnnnnnnnnnnnnnnnnnnnnnnnnnnnnnnnnnnnnnnnnnnnnnnnnnnnnnnnnnnnnnnnnnnnnnnnnnnnnnnnnnnnnnnnnnnnnnnnnnnnnnnnnnnnnnnnnnnnnnnnnnnnnnnnnnnnnnnnnnnnnnnnnnnnnnnnnnnnnnnnnnnnnnnnnnnnnnnnnnnnnnnnnnnnnnnnnnnnnnnnnnnnnnnnnnnnnnnnnnnnnnnnnnnnnnnnnnnnnnnnnnnnnnnnnnnnnnnnnnnnnnnnnnnnnnnnnnnnnnnnnnnnnnnnnnnnnnnnnnnnnnnnnnnnnnnnnnnnnnnnnnnnnnnnnnnnnnnnnnnnnnnnnnnnnnnnnnnnnnnnnnnnnnnnnnnnnnnnnnnnnnnnnnnnnnnnnnnnnnnnnnnnnnnnnnnnnnnnnnnnnnnnnnnnnnnnnnnnnnnnnnnnnnnnnnnnnnnnnnnnnnnnnnnnnnnnnnnnnnnnnnnnnnnnnnnnnnnnnnnnnnnnnnnnnnnnnnnnnnnnnnnnnnnnnnnnnnnnnnnnnnnnnnnnnnnnnnnnnnnnnnnnnnnnnnnnnnnnnnnnnnnnnnnnnnnnnnnnnnnnnnnnnnnnnnnnnnnnnnnnnnnnnnnnnnnnnnnnnnnnnnnnnnnnnnnnnnnnnnnnnnnnnnnnnnnnnnnnnnnnnnnnnnnnnnnnnnnnnnnnnnnnnnnnnnnnnnnnnnnnnnnnnnnnnnnnnnnnnnnnnnnnnnnnnnnnnnnnnnnnnnnnnnnnnnnnnnnnnnnnnnnnnnnnnnnnnnnnnnnnnnnnnnnnnnnnnnnnnnnnnnnnnnnnnnnnnnnnnnnnnnnnnnnnnnnnnnnnnnnnnnnnnnnnnnnnnnnnnnnnnnnnnnnnnnnnnnnnnnnnnnnnnnnnnnnnnnnnnnnnnnnnnnnnnnnnnnnnnnnnnnnnnnnnnnnnnnnnnnnnnnnnnnnnnnnnnnnnnnnnnnnnnnnnnnnnnnnnnnnnnnnnnnnnnnnnnnnnnnnnnnnnnnnnnnnnnnnnnnnnnnnnnnnnnnnnnnnnnnnnnnnnnnnnnnnnnnnnnnnnnnnnnnnnnnnnnnnnnnnnnnnnnnnnnnnnnnnnnnnnnnnnnnnnnnnnnnnnnnnnnnnnnnnnnnnnnnnnnnnnnnnnnnnnnnnnnnnnnnnnnnnnnnnnnnnnnnnnnnnnnnnnnnnnnnnnnnnnnnnnnnnnnnnnnnnnnnnnnnnnnnnnnnnnnnnnnnnnnnnnnnnnnnnnnnnnnnnnnnnnnnnnnnnnnnnnnnnnnnnnnnnnnnnnnnnnnnnnnnnnnnnnnnnnnnnnnnnnnnnnnnnnnnnnnnnnnnnnnnnnnnnnnnnnnnnnnnnnnnnnnnnnnnnnnnnnnnnnnnnnnnnnnnnnnnnnnnnnnnnnnnnnnnnnnnnnnnnnnnnnnnnnnnnnnnnnnnnnnnnnnnnnnnnnnnnnnnnnnnnnnnnnnnnnnnnnnnnnnnnnnnnnnnnnnnnnnnnnnnnnnnnnnnnnnnnnnnnnnnnnnnnnnnnnnnnnnnnnnnnnnnnnnnnnnnnnnnnnnnnnnnnnnnnnnnnnnnnnnnnnnnnnnnnnnnnnnnnnnnnnnnnnnnnnnnnnnnnnnnnnnnnnnnnnnnnnnnnnnnnnnnnnnnnnnnnnnnnnnnnnnnnnnnnnnnnnnnnnnnnnnnnnnnnnnnnnnnnnnnnnnnnnnnnnnnnnnnnnnnnnnnnnnnnnnnnnnnnnnnnnnnnnnnnnnnnnnnnnnnnnnnnnnnnnnnnnnnnnnnnnnnnnnnnnnnnnnnnnnnnnnnnnnnnnnnnnnnnnnnnnnnnnnnnnnnnnnnnnnnnnnnnnnnnnnnnnnnnnnnnnnnnnnnnnnnnnnnnnnnnnnnnnnnnnnnnnnnnnnnnnnnnnnnnnnnnnnnnnnnnnnnnnnnnnnnnnnnnnnnnnnnnnnnnnnnnnnnnnnnnnnnnnnnnnnnnnnnnnnnnnnnnnnnnnnnnnnnnnnnnnnnnnnnnnnnnnnnnnnnnnnnnnnnnnnnnnnnnnnnnnnnnnnnnnnnnnnnnnnnnnnnnnnnnnnnnnnnnnnnnnnnnnnnnnnnnnnnnnnnnnnnnnnnnnnnnnnnnnnnnnnnnnnnnnnnnnnnnnnnnnnnnnnnnnnnnnnnnnnnnnnnnnnnnnnnnnnnnnnnnnnnnnnnnnnnnnnnnnnnnnnnnnnnnnnnnnnnnnnnnnnnnnnnnnnnnnnnnnnnnnnnnnnnnnnnnnnnnnnnnnnnnnnnnnnnnnnnnnnnnnnnnnnnnnnnnnnnnnnnnnnnnnnnnnnnnnnnnnnnnnnnnnnnnnnnnnnnnnnnnnnnnnnnnnnnnnnnnnnnnnnnnnnnnnnnnnnnnnnnnnnnnnnnnnnnnnnnnnnnnnnnnnnnnnnnnnnnnnnnnnnnnnnnnnnnnnnnnnnnnnnnnnnnnnnnnnnnnnnnnnnnnnnnnnnnnnnnnnnnnnnnnnnnnnnnnnnnnnnnnnnnnnnnnnnnnnnnnnnnnnnnnnnnnnnnnnnnnnnnnnnnnnnnnnnnnnnnnnnnnnnnnnnnnnnnnnnnnnnnnnnnnnnnnnnnnnnnnnnnnnnnnnnnnnnnnnnnnnnnnnnnnnnnnnnnnnnnnnnnnnnnnnnnnnnnnnnnnnnnnnnnnnnnnnnnnnnnnnnnnnnnnnnnnnnnnnnnnnnnnnnnnnnnnnnnnnnnnnnnnnnnnnnnnnnnnnnnnnnnnnnnnnnnnnnnnnnnnnnnnnnnnnnnnnnnnnnnnnnnnnnnnnnnnnnnnnnnnnnnnnnnnnnnnnnnnnnnnnnnnnnnnnnnnnnnnnnnnnnnnnnnnnnnnnnnnnnnnnnnnnnnnnnnnnnnnnnnnnnnnnnnnnnnnnnnnnnnnnnnnnnnnnnnnnnnnnnnnnnnnnnnnnnnnnnnnnnnnnnnnnnnnnnnnnnnnnnnnnnnnnnnnnnnnnnnnnnnnnnnnnnnnnnnnnnnnnnnnnnnnnnnnnnnnnnnnnnnnnnnnnnnnnnnnnnnnnnnnnnnnnnnnnnnnnnnnnnnnnnnnnnnnnnnnnnnnnnnnnnnnnnnnnnnnnnnnnnnnnnnnnnnnnnnnnnnnnnnnnnnnnnnnnnnnnnnnnnnnnnnnnnnnnnnnnnnnnnnnnnnnnnnnnnnnnnnnnnnnnnnnnnnnnnnnnnnnnnnnnnnnnnnnnnnnnnnnnnnnnnnnnnnnnnnnnnnnnnnnnnnnnnnnnnnnnnnnnnnnnnnnnnnnnnnnnnnnnnnnnnnnnnnnnnnnnnnnnnnnnnnnnnnnnnnnnnnnnnnnnnnnnnnnnnnnnnnnnnnnnnnnnnnnnnnnnnnnnnnnnnnnnnnnnnnnnnnnnnnnnnnnnnnnnnnnnnnnnnnnnnnnnnnnnnnnnnnnnnnnnnnnnnnnnnnnnnnnnnnnnnnnnnnnnnnnnnnnnnnnnnnnnnnnnnnnnnnnnnnnnnnnnnnnnnnnnnnnnnnnnnnnnnnnnnnnnnnnnnnnnnnnnnnnnnnnnnnnnnnnnnnnnnnnnnnnnnnnnnnnnnnnnnnnnnnnnnnnnnnnnnnnnnnnnnnnnnnnnnnnnnnnnnnnnnnnnnnnnnnnnnnnnnnnnnnnnnnnnnnnnnnnnnnnnnnnnnnnnnnnnnnnnnnnnnnnnnnnnnnnnnnnnnnnnnnnnnnnnnnnnnnnnnnnnnnnnnnnnnnnnnnnnnnnnnnnnnnnnnnnnnnnnnnnnnnnnnnnnnnnnnnnnnnnnnnnnnnnnnnnnnnnnnnnnnnnnnnnnnnnnnnnnnnnnnnnnnnnnnnnnnnnnnnnnnnnnnnnnnnnnnnnnnnnnnnnnnnnnnnnnnnnnnnnnnnnnnnnnnnnnnnnnnnnnnnnnnnnnnnnnnnnnnnnnnnnnnnnnnnnnnnnnnnnnnnnnnnnnnnnnnnnnnnnnnnnnnnnnnnnnnnnnnnnnnnnnnnnnnnnnnnnnnnnnnnnnnnnnnnnnnnnnnnnnnnnnnnnnnnnnnnnnnnnnnnnnnnnnnnnnnnnnnnnnnnnnnnnnnnnnnnnnnnnnnnnnnnnnnnnnnnnnnnnnnnnnnnnnnnnnnnnnnnnnnnnnnnnnnnnnnnnnnnnnnnnnnnnnnnnnnnnnnnnnnnnnnnnnnnnnnnnnnnnnnnnnnnnnnnnnnnnnnnnnnnnnnnnnnnnnnnnnnnnnnnnnnnnnnnnnnnnnnnnnnnnnnnnnnnnnnnnnnnnnnnnnnnnnnnnnnnnnnnnnnnnnnnnnnnnnnnnnnnnnnnnnnnnnnnnnnnnnnnnnnnnnnnnnnnnnnnnnnnnnnnnnnnnnnnnnnnnnnnnnnnnnnnnnnnnnnnnnnnnnnnnnnnnnnnnnnnnnnnnnnnnnnnnnnnnnnnnnnnnnnnnnnnnnnnnnnnnnnnnnnnnnnnnnnnnnnnnnnnnnnnnnnnnnnnnnnnnnnnnnnnnnnnnnnnnnnnnnnnnnnnnnnnnnnnnnnnnnnnnnnnnnnnnnnnnnnnnnnnnnnnnnnnnnnnnnnnnnnnnnnnnnnnnnnnnnnnnnnnnnnnnnnnnnnnnnnnnnnnnnnnnnnnnnnnnnnnnnnnnnnnnnnnnnnnnnnnnnnnnnnnnnnnnnnnnnnnnnnnnnnnnnnnnnnnnnnnnnnnnnnnnnnnnnnnnnnnnnnnnnnnnnnnnnnnnnnnnnnnnnnnnnnnnnnnnnnnnnnnnnnnnnnnnnnnnnnnnnnnnnnnnnnnnnnnnnnnnnnnnnnnnnnnnnnnnnnnnnnnnnnnnnnnnnnnnnnnnnnnnnnnnnnnnnnnnnnnnnnnnnnnnnnnnnnnnnnnnnnnnnnnnnnnnnnnnnnnnnnnnnnnnnnnnnnnnnnnnnnnnnnnnnnnnnnnnnnnnnnnnnnnnnnnnnnnnnnnnnnnnnnnnnnnnnnnnnnnnnnnnnnnnnnnnnnnnnnnnnnnnnnnnnnnnnnnnnnnnnnnnnnnnnnnnnnnnnnnnnnnnnnnnnnnnnnnnnnnnnnnnnnnnnnnnnnnnnnnnnnnnnnnnnnnnnnnnnnnnnnnnnnnnnnnnnnnnnnnnnnnnnnnnnnnnnnnnnnnnnnnnnnnnnnnnnnnnnnnnnnnnnnnnnnnnnnnnnnnnnnnnnnnnnnnnnnnnnnnnnnnnnnnnnnnnnnnnnnnnnnnnnnnnnnnnnnnnnnnnnnnnnnnnnnnnnnnnnnnnnnnnnnnnnnnnnnnnnnnnnnnnnnnnnnnnnnnnnnnnnnnnnnnnnnnnnnnnnnnnnnnnnnnnnnnnnnnnnnnnnnnnnnnnnnnnnnnnnnnnnnnnnnnnnnnnnnnnnnnnnnnnnnnnnnnnnnnnnnnnnnnnnnnnnnnnnnnnnnnnnnnnnnnnnnnnnnnnnnnnnnnnnnnnnnnnnnnnnnnnnnnnnnnnnnnnnnnnnnnnnnnnnnnnnnnnnnnnnnnnnnnnnnnnnnnnnnnnnnnnnnnnnnnnnnnnnnnnnnnnnnnnnnnnnnnnnnnnnnnnnnnnnnnnnnnnnnnnnnnnnnnnnnnnnnnnnnnnnnnnnnnnnnnnnnnnnnnnnnnnnnnnnnnnnnnnnnnnnnnnnnnnnnnnnnnnnnnnnnnnnnnnnnnnnnnnnnnnnnnnnnnnnnnnnnnnnnnnnnnnnnnnnnnnnnnnnnnnnnnnnnnnnnnnnnnnnnnnnnnnnnnnnnnnnnnnnnnnnnnnnnnnnnnnnnnnnnnnnnnnnnnnnnnnnnnnnnnnnnnnnnnnnnnnnnnnnnnnnnnnnnnnnnnnnnnnnnnnnnnnnnnnnnnnnnnnnnnnnnnnnnnnnnnnnnnnnnnnnnnnnnnnnnnnnnnnnnnnnnnnnnnnnnnnnnnnnnnnnnnnnnnnnnnnnnnnnnnnnnnnnnnnnnnnnnnnnnnnnnnnnnnnnnnnnnnnnnnnnnnnnnnnnnnnnnnnnnnnnnnnnnnnnnnnnnnnnnnnnnnnnnnnnnnnnnnnnnnnnnnnnnnnnnnnnnnnnnnnnnnnnnnnnnnnnnnnnnnnnnnnnnnnnnnnnnnnnnnnnnnnnnnnnnnnnnnnnnnnnnnnnnnnnnnnnnnnnnnnnnnnnnnnnnnnnnnnnnnnnnnnnnnnnnnnnnnnnnnnnnnnnnnnnnnnnnnnnnnnnnnnnnnnnnnnnnnnnnnnnnnnnnnnnnnnnnnnnnnnnnnnnnnnnnnnnnnnnnnnnnnnnnnnnnnnnnnnnnnnnnnnnnnnnnnnnnnnnnnnnnnnnnnnnnnnnnnnnnnnnnnnnnnnnnnnnnnnnnnnnnnnnnnnnnnnnnnnnnnnnnnnnnnnnnnnnnnnnnnnnnnnnnnnnnnnnnnnnnnnnnnnnnnnnnnnnnnnnnnnnnnnnnnnnnnnnnnnnnnnnnnnnnnnnnnnnnnnnnnnnnnnnnnnnnnnnnnnnnnnnnnnnnnnnnnnnnnnnnnnnnnnnnnnnnnnnnnnnnnnnnnnnnnnnnnnnnnnnnnnnnnnnnnnnnnnnnnnnnnnnnnnnnnnnnnnnnnnnnnnnnnnnnnnnnnnnnnnnnnnnnnnnnnnnnnnnnnnnnnnnnnnnnnnnnnnnnnnnnnnnnnnnnnnnnnnnnnnnnnnnnnnnnnnnnnnnnnnnnnnnnnnnnnnnnnnnnnnnnnnnnnnnnnnnnnnnnnnnnnnnnnnnnnnnnnnnnnnnnnnnnnnnnnnnnnnnnnnnnnnnnnnnnnnnnnnnnnnnnnnnnnnnnnnnnnnnnnnnnnnnnnnnnnnnnnnnnnnnnnnnnnnnnnnnnnnnnnnnnnnnnnnnnnnnnnnnnnnnnnnnnnnnnnnnnnnnnnnnnnnnnnnnnnnnnnnnnnnnnnnnnnnnnnnnnnnnnnnnnnnnnnnnnnnnnnnnnnnnnnnnnnnnnnnnnnnnnnnnnnnnnnnnnnnnnnnnnnnnnnnnnnnnnnnnnnnnnnnnnnnnnnnnnnnnnnnnnnnnnnnnnnnnnnnnnnnnnnnnnnnnnnnnnnnnnnnnnnnnnnnnnnnnnnnnnnnnnnnnnnnnnnnnnnnnnnnnnnnnnnnnnnnnnnnnnnnnnnnnnnnnnnnnnnnnnnnnnnnnnnnnnnnnnnnnnnnnnnnnnnnnnnnnnnnnnnnnnnnnnnnnnnnnnnnnnnnnnnnnnnnnnnnnnnnnnnnnnnnnnnnnnnnnnnnnnnnnnnnnnnnnnnnnnnnnnnnnnnnnnnnnnnnnnnnnnnnnnnnnnnnnnnnnnnnnnnnnnnnnnnnnnnnnnnnnnnnnnnnnnnnnnnnnnnnnnnnnnnnnnnnnnnnnnnnnnnnnnnnnnnnnnnnnnnnnnnnnnnnnnnnnnnnnnnnnnnnnnnnnnnnnnnnnnnnnnnnnnnnnnnnnnnnnnnnnnnnnnnnnnnnnnnnnnnnnnnnnnnnnnnnnnnnnnnnnnnnnnnnnnnnnnnnnnnnnnnnnnnnnnnnnnnnnnnnnnnnnnnnnnnnnnnnnnnnnnnnnnnnnnnnnnnnnnnnnnnnnnnnnnnnnnnnnnnnnnnnnnnnnnnnnnnnnnnnnnnnnnnnnnnnnnnnnnnnnnnnnnnnnnnnnnnnnnnnnnnnnnnnnnnnnnnnnnnnnnnnnnnnnnnnnnnnnnnnnnnnnnnnnnnnnnnnnnnnnnnnnnnnnnnnnnnnnnnnnnnnnnnnnnnnnnnnnnnnnnnnnnnnnnnnnnnnnnnnnnnnnnnnnnnnnnnnnnnnnnnnnnnnnnnnnnnnnnnnnnnnnnnnnnnnnnnnnnnnnnnnnnnnnnnnnnnnnnnnnnnnnnnnnnnnnnnnnnnnnnnnnnnnnnnnnnnnnnnnnnnnnnnnnnnnnnnnnnnnnnnnnnnnnnnnnnnnnnnnnnnnnnnnnnnnnnnnnnnnnnnnnnnnnnnnnnnnnnnnnnnnnnnnnnnnnnnnnnnnnnnnnnnnnnnnnnnnnnnnnnnnnnnnnnnnnnnnnnnnnnnnnnnnnnnnnnnnnnnnnnnnnnnnnnnnnnnnnnnnnnnnnnnnnnnnnnnnnnnnnnnnnnnnnnnnnnnnnnnnnnnnnnnnnnnnnnnnnnnnnnnnnnnnnnnnnnnnnnnnnnnnnnnnnnnnnnnnnnnnnnnnnnnnnnnnnnnnnnnnnnnnnnnnnnnnnnnnnnnnnnnnnnnnnnnnnnnnnnnnnnnnnnnnnnnnnnnnnnnnnnnnnnnnnnnnnnnnnnnnnnnnnnnnnnnnnnnnnnnnnnnnnnnnnnnnnnnnnnnnnnnnnnnnnnnnnnnnnnnnnnnnnnnnnnnnnnnnnnnnnnnnnnnnnnnnnnnnnnnnnnnnnnnnnnnnnnnnnnnnnnnnnnnnnnnnnnnnnnnnnnnnnnnnnnnnnnnnnnnnnnnnnnnnnnnnnnnnnnnnnnnnnnnnnnnnnnnnnnnnnnnnnnnnnnnnnnnnnnnnnnnnnnnnnnnnnnnnnnnnnnnnnnnnnnnnnnnnnnnnnnnnnnnnnnnnnnnnnnnnnnnnnnnnnnnnnnnnnnnnnnnnnnnnnnnnnnnnnnnnnnnnnnnnnnnnnnnnnnnnnnnnnnnnnnnnnnnnnnnnnnnnnnnnnnnnnnnnnnnnnnnnnnnnnnnnnnnnnnnnnnnnnnnnnnnnnnnnnnnnnnnnnnnnnnnnnnnnnnnnnnnnnnnnnnnnnnnnnnnnnnnnnnnnnnnnnnnnnnnnnnnnnnnnnnnnnnnnnnnnnnnnnnnnnnnnnnnnnnnnnnnnnnnnnnnnnnnnnnnnnnnnnnnnnnnnnnnnnnnnnnnnnnnnnnnnnnnnnnnnnnnnnnnnnnnnnnnnnnnnnnnnnnnnnnnnnnnnnnnnnnnnnnnnnnnnnnnnnnnnnnnnnnnnnnnnnnnnnnnnnnnnnnnnnnnnnnnnnnnnnnnnnnnnnnnnnnnnnnnnnnnnnnnnnnnnnnnnnnnnnnnnnnnnnnnnnnnnnnnnnnnnnnnnnnnnnnnnnnnnnnnnnnnnnnnnnnnnnnnnnnnnnnnnnnnnnnnnnnnnnnnnnnnnnnnnnnnnnnnnnnnnnnnnnnnnnnnnnnnnnnnnnnnnnnnnnnnnnnnnnnnnnnnnnnnnnnnnnnnnnnnnnnnnnnnnnnnnnnnnnnnnnnnnnnnnnnnnnnnnnnnnnnnnnnnnnnnnnnnnnnnnnnnnnnnnnnnnnnnnnnnnnnnnnnnnnnnnnnnnnnnnnnnnnnnnnnnnnnnnnnnnnnnnnnnnnnnnnnnnnnnnnnnnnnnnnnnnnnnnnnnnnnnnnnnnnnnnnnnnnnnnnnnnnnnnnnnnnnnnnnnnnnnnnnnnnnnnnnnnnnnnnnnnnnnnnnnnnnnnnnnnnnnnnnnnnnnnnnnnnnnnnnnnnnnnnnnnnnnnnnnnnnnnnnnnnnnnnnnnnnnnnnnnnnnnnnnnnnnnnnnnnnnnnnnnnnnnnnnnnnnnnnnnnnnnnnnnnnnnnnnnnnnnnnnnnnnnnnnnnnnnnnnnnnnnnnnnnnnnnnnnnnnnnnnnnnnnnnnnnnnnnnnnnnnnnnnnnnnnnnnnnnnnnnnnnnnnnnnnnnnnnnnnnnnnnnnnnnnnnnnnnnnnnnnnnnnnnnnnnnnnnnnnnnnnnnnnnnnnnnnnnnnnnnnnnnnnnnnnnnnnnnnnnnnnnnnnnnnnnnnnnnnnnnnnnnnnnnnnnnnnnnnnnnnnnnnnnnnnnnnnnnnnnnnnnnnnnnnnnnnnnnnnnnnnnnnnnnnnnnnnnnnnnnnnnnnnnnnnnnnnnnnnnnnnnnnnnnnnnnnnnnnnnnnnnnnnnnnnnnnnnnnnnnnnnnnnnnnnnnnnnnnnnnnnnnnnnnnnnnnnnnnnnnnnnnnnnnnnnnnnnnnnnnnnnnnnnnnnnnnnnnnnnnnnnnnnnnnnnnnnnnnnnnnnnnnnnnnnnnnnnnnnnnnnnnnnnnnnnnnnnnnnnnnnnnnnnnnnnnnnnnnnnnnnnnnnnnnnnnnnnnnnnnnnnnnnnnnnnnnnnnnnnnnnnnnnnnnnnnnnnnnnnnnnnnnnnnnnnnnnnnnnnnnnnnnnnnnnnnnnnnnnnnnnnnnnnnnnnnnnnnnnnnnnnnnnnnnnnnnnnnnnnnnnnnnnnnnnnnnnnnnnnnnnnnnnnnnnnnnnnnnnnnnnnnnnnnnnnnnnnnnnnnnnnnnnnnnnnnnnnnnnnnnnnnnnnnnnnnnnnnnnnnnnnnnnnnnnnnnnnnnnnnnnnnnnnnnnnnnnnnnnnnnnnnnnnnnnnnnnnnnnnnnnnnnnnnnnnnnnnnnnnnnnnnnnnnnnnnnnnnnnnnnnnnnnnnnnnnnnnnnnnnnnnnnnnnnnnnnnnnnnnnnnnnnnnnnnnnnnnnnnnnnnnnnnnnnnnnnnnnnnnnnnnnnnnnnnnnnnnnnnnnnnnnnnnnnnnnnnnnnnnnnnnnnnnnnnnnnnnnnnnnnnnnnnnnnnnnnnnnnnnnnnnnnnnnnnnnnnnnnnnnnnnnnnnnnnnnnnnnnnnnnnnnnnnnnnnnnnnnnnnnnnnnnnnnnnnnnnnnnnnnnnnnnnnnnnnnnnnnnnnnnnnnnnnnnnnnnnnnnnnnnnnnnnnnnnnnnnnnnnnnnnnnnnnnnnnnnnnnnnnnnnnnnnnnnnnnnnnnnnnnnnnnnnnnnnnnnnnnnnnnnnnnnnnnnnnnnnnnnnnnnnnnnnnnnnnnnnnnnnnnnnnnnnnnnnnnnnnnnnnnnnnnnnnnnnnnnnnnnnnnnnnnnnnnnnnnnnnnnnnnnnnnnnnnnnnnnnnnnnnnnnnnnnnnnnnnnnnnnnnnnnnnnnnnnnnnnnnnnnnnnnnnnnnnnnnnnnnnnnnnnnnnnnnnnnnnnnnnnnnnnnnnnnnnnnnnnnnnnnnnnnnnnnnnnnnnnnnnnnnnnnnnnnnnnnnnnnnnnnnnnnnnnnnnnnnnnnnnnnnnnnnnnnnnnnnnnnnnnnnnnnnnnnnnnnnnnnnnnnnnnnnnnnnnnnnnnnnnnnnnnnnnnnnnnnnnnnnnnnnnnnnnnnnnnnnnnnnnnnnnnnnnnnnnnnnnnnnnnnnnnnnnnnnnnnnnnnnnnnnnnnnnnnnnnnnnnnnnnnnnnnnnnnnnnnnnnnnnnnnnnnnnnnnnnnnnnnnnnnnnnnnnnnnnnnnnnnnnnnnnnnnnnnnnnnnnnnnnnnnnnnnnnnnnnnnnnnnnnnnnnnnnnnnnnnnnnnnnnnnnnnnnnnnnnnnnnnnnnnnnnnnnnnnnnnnnnnnnnnnnnnnnnnnnnnnnnnnnnnnnnnnnnnnnnnnnnnnnnnnnnnnnnnnnnnnnnnnnnnnnnnnnnnnnnnnnnnnnnnnnnnnnnnnnnnnnnnnnnnnnnnnnnnnnnnnnnnnnnnnnnnnnnnnnnnnnnnnnnnnnnnnnnnnnnnnnnnnnnnnnnnnnnnnnnnnnnnnnnnnnnnnnnnnnnnnnnnnnnnnnnnnnnnnnnnnnnnnnnnnnnnnnnnnnnnnnnnnnnnnnnnnnnnnnnnnnnnnnnnnnnnnnnnnnnnnnnnnnnnnnnnnnnnnnnnnnnnnnnnnnnnnnnnnnnnnnnnnnnnnnnnnnnnnnnnnnnnnnnnnnnnnnnnnnnnnnnnnnnnnnnnnnnnnnnnnnnnnnnnnnnnnnnnnnnnnnnnnnnnnnnnnnnnnnnnnnnnnnnnnnnnnnnnnnnnnnnnnnnnnnnnnnnnnnnnnnnnnnnnnnnnnnnnnnnnnnnnnnnnnnnnnnnnnnnnnnnnnnnnnnnnnnnnnnnnnnnnnnnnnnnnnnnnnnnnnnnnnnnnnnnnnnnnnnnnnnnnnnnnnnnnnnnnnnnnnnnnnnnnnnnnnnnnnnnnnnnnnnnnnnnnnnnnnnnnnnnnnnnnnnnnnnnnnnnnnnnnnnnnnnnnnnnnnnnnnnnnnnnnnnnnnnnnnnnnnnnnnnnnnnnnnnnnnnnnnnnnnnnnnnnnnnnnnnnnnnnnnnnnnnnnnnnnnnnnnnnnnnnnnnnnnnnnnnnnnnnnnnnnnnnnnnnnnnnnnnnnnnnnnnnnnnnnnnnnnnnnnnnnnnnnnnnnnnnnnnnnnnnnnnnnnnnnnnnnnnnnnnnnnnnnnnnnnnnnnnnnnnnnnnnnnnnnnnnnnnnnnnnnnnnnnnnnnnnnnnnnnnnnnnnnnnnnnnnnnnnnnnnnnnnnnnnnnnnnnnnnnnnnnnnnnnnnnnnnnnnnnnnnnnnnnnnnnnnnnnnnnnnnnnnnnnnnnnnnnnnnnnnnnnnnnnnnnnnnnnnnnnnnnnnnnnnnnnnnnnnnnnnnnnnnnnnnnnnnnnnnnnnnnnnnnnnnnnnnnnnnnnnnnnnnnnnnnnnnnnnnnnnnnnnnnnnnnnnnnnnnnnnnnnnnnnnnnnnnnnnnnnnnnnnnnnnnnnnnnnnnnnnnnnnnnnnnnnnnnnnnnnnnnnnnnnnnnnnnnnnnnnnnnnnnnnnnnnnnnnnnnnnnnnnnnnnnnnnnnnnnnnnnnnnnnnnnnnnnnnnnnnnnnnnnnnnnnnnnnnnnnnnnnnnnnnnnnnnnnnnnnnnnnnnnnnnnnnnnnnnnnnnnnnnnnnnnnnnnnnnnnnnnnnnnnnnnnnnnnnnnnnnnnnnnnnnnnnnnnnnnnnnnnnnnnnnnnnnnnnnnnnnnnnnnnnnnnnnnnnnnnnnnnnnnnnnnnnnnnnnnnnnnnnnnnnnnnnnnnnnnnnnnnnnnnnnnnnnnnnnnnnnnnnnnnnnnnnnnnnnnnnnnnnnnnnnnnnnnnnnnnnnnnnnnnnnnnnnnnnnnnnnnnnnnnnnnnnnnnnnnnnnnnnnnnnnnnnnnnnnnnnnnnnnnnnnnnnnnnnnnnnnnnnnnnnnnnnnnnnnnnnnnnnnnnnnnnnnnnnnnnnnnnnnnnnnnnnnnnnnnnnnnnnnnnnnnnnnnnnnnnnnnnnnnnnnnnnnnnnnnnnnnnnnnnnnnnnnnnnnnnnnnnnnnnnnnnnnnnnnnnnnnnnnnnnnnnnnnnnnnnnnnnnnnnnnnnnnnnnnnnnnnnnnnnnnnnnnnnnnnnnnnnnnnnnnnnnnnnnnnnnnnnnnnnnnnnnnnnnnnnnnnnnnnnnnnnnnnnnnnnnnnnnnnnnnnnnnnnnnnnnnnnnnnnnnnnnnnnnnnnnnnnnnnnnnnnnnnnnnnnnnnnnnnnnnnnnnnnnnnnnnnnnnnnnnnnnnnnnnnnnnnnnnnnnnnnnnnnnnnnnnnnnnnnnnnnnnnnnnnnnnnnnnnnnnnnnnnnnnnnnnnnnnnnnnnnnnnnnnnnnnnnnnnnnnnnnnnnnnnnnnnnnnnnnnnnnnnnnnnnnnnnnnnnnnnnnnnnnnnnnnnnnnnnnnnnnnnnnnnnnnnnnnnnnnnnnnnnnnnnnnnnnnnnnnnnnnnnnnnnnnnnnnnnnnnnnnnnnnnnnnnnnnnnnnnnnnnnnnnnnnnnnnnnnnnnnnnnnnnnnnnnnnnnnnnnnnnnnnnnnnnnnnnnnnnnnnnnnnnnnnnnnnnnnnnnnnnnnnnnnnnnnnnnnnnnnnnnnnnnnnnnnnnnnnnnnnnnnnnnnnnnnnnnnnnnnnnnnnnnnnnnnnnnnnnnnnnnnnnnnnnnnnnnnnnnnnnnnnnnnnnnnnnnnnnnnnnnnnnnnnnnnnnnnnnnnnnnnnnnnnnnnnnnnnnnnnnnnnnnnnnnnnnnnnnnnnnnnnnnnnnnnnnnnnnnnnnnnnnnnnnnnnnnnnnnnnnnnnnnnnnnnnnnnnnnnnnnnnnnnnnnnnnnnnnnnnnnnnnnnnnnnnnnnnnnnnnnnnnnnnnnnnnnnnnnnnnnnnnnnnnnnnnnnnnnnnnnnnnnnnnnnnnnnnnnnnnnnnnnnnnnnnnnnnnnnnnnnnnnnnnnnnnnnnnnnnnnnnnnnnnnnnnnnnnnnnnnnnnnnnnnnnnnnnnnnnnnnnnnnnnnnnnnnnnnnnnnnnnnnnnnnnnnnnnnnnnnnnnnnnnnnnnnnnnnnnnnnnnnnnnnnnnnnnnnnnnnnnnnnnnnnnnnnnnnnnnnnnnnnnnnnnnnnnnnnnnnnnnnnnnnnnnnnnnnnnnnnnnnnnnnnnnnnnnnnnnnnnnnnnnnnnnnnnnnnnnnnnnnnnnnnnnnnnnnnnnnnnnnnnnnnnnnnnnnnnnnnnnnnnnnnnnnnnnnnnnnnnnnnnnnnnnnnnnnnnnnnnnnnnnnnnnnnnnnnnnnnnnnnnnnnnnnnnnnnnnnnnnnnnnnnnnnnnnnnnnnnnnnnnnnnnnnnnnnnnnnnnnnnnnnnnnnnnnnnnnnnnnnnnnnnnnnnnnnnnnnnnnnnnnnnnnnnnnnnnnnnnnnnnnnnnnnnnnnnnnnnnnnnnnnnnnnnnnnnnnnnnnnnnnnnnnnnnnnnnnnnnnnnnnnnnnnnnnnnnnnnnnnnnnnnnnnnnnnnnnnnnnnnnnnnnnnnnnnnnnnnnnnnnnnnnnnnnnnnnnnnnnnnnnnnnnnnnnnnnnnnnnnnnnnnnnnnnnnnnnnnnnnnnnnnnnnnnnnnnnnnnnnnnnnnnnnnnnnnnnnnnnnnnnnnnnnnnnnnnnnnnnnnnnnnnnnnnnnnnnnnnnnnnnnnnnnnnnnnnnnnnnnnnnnnnnnnnnnnnnnnnnnnnnnnnnnnnnnnnnnnnnnnnnnnnnnnnnnnnnnnnnnnnnnnnnnnnnnnnnnnnnnnnnnnnnnnnnnnnnnnnnnnnnnnnnnnnnnnnnnnnnnnnnnnnnnnnnnnnnnnnnnnnnnnnnnnnnnnnnnnnnnnnnnnnnnnnnnnnnnnnnnnnnnnnnnnnnnnnnnnnnnnnnnnnnnnnnnnnnnnnnnnnnnnnnnnnnnnnnnnnnnnnnnnnnnnnnnnnnnnnnnnnnnnnnnnnnnnnnnnnnnnnnnnnnnnnnnnnnnnnnnnnnnnnnnnnnnnnnnnnnnnnnnnnnnnnnnnnnnnnnnnnnnnnnnnnnnnnnnnnnnnnnnnnnnnnnnnnnnnnnnnnnnnnnnnnnnnnnnnnnnnnnnnnnnnnnnnnnnnnnnnnnnnnnnnnnnnnnnnnnnnnnnnnnnnnnnnnnnnnnnnnnnnnnnnnnnnnnnnnnnnnnnnnnnnnnnnnnnnnnnnnnnnnnnnnnnnnnnnnnnnnnnnnnnnnnnnnnnnnnnnnnnnnnnnnnnnnnnnnnnnnnnnnnnnnnnnnnnnnnnnnnnnnnnnnnnnnnnnnnnnnnnnnnnnnnnnnnnnnnnnnnnnnnnnnnnnnnnnnnnnnnnnnnnnnnnnnnnnnnnnnnnnnnnnnnnnnnnnnnnnnnnnnnnnnnnnnnnnnnnnnnnnnnnnnnnnnnnnnnnnnnnnnnnnnnnnnnnnnnnnnnnnnnnnnnnnnnnnnnnnnnnnnnnnnnnnnnnnnnnnnnnnnnnnnnnnnnnnnnnnnnnnnnnnnnnnnnnnnnnnnnnnnnnnnnnnnnnnnnnnnnnnnnnnnnnnnnnnnnnnnnnnnnnnnnnnnnnnnnnnnnnnnnnnnnnnnnnnnnnnnnnnnnnnnnnnnnnnnnnnnnnnnnnnnnnnnnnnnnnnnnnnnnnnnnnnnnnnnnnnnnnnnnnnnnnnnnnnnnnnnnnnnnnnnnnnnnnnnnnnnnnnnnnnnnnnnnnnnnnnnnnnnnnnnnnnnnnnnnnnnnnnnnnnnnnnnnnnnnnnnnnnnnnnnnnnnnnnnnnnnnnnnnnnnnnnnnnnnnnnnnnnnnnnnnnnnnnnnnnnnnnnnnnnnnnnnnnnnnnnnnnnnnnnnnnnnnnnnnnnnnnnnnnnnnnnnnnnnnnnnnnnnnnnnnnnnnnnnnnnnnnnnnnnnnnnnnnnnnnnnnnnnnnnnnnnnnnnnnnnnnnnnnnnnnnnnnnnnnnnnnnnnnnnnnnnnnnnnnnnnnnnnnnnnnnnnnnnnnnnnnnnnnnnnnnnnnnnnnnnnnnnnnnnnnnnnnnnnnnnnnnnnnnnnnnnnnnnnnnnnnnnnnnnnnnnnnnnnnnnnnnnnnnnnnnnnnnnnnnnnnnnnnnnnnnnnnnnnnnnnnnnnnnnnnnnnnnnnnnnnnnnnnnnnnnnnnnnnnnnnnnnnnnnnnnnnnnnnnnnnnnnnnnnnnnnnnnnnnnnnnnnnnnnnnnnnnnnnnnnnnnnnnnnnnnnnnnnnnnnnnnnnnnnnnnnnnnnnnnnnnnnnnnnnnnnnnnnnnnnnnnnnnnnnnnnnnnnnnnnnnnnnnnnnnnnnnnnnnnnnnnnnnnnnnnnnnnnnnnnnnnnnnnnnnnnnnnnnnnnnnnnnnnnnnnnnnnnnnnnnnnnnnnnnnnnnnnnnnnnnnnnnnnnnnnnnnnnnnnnnnnnnnnnnnnnnnnnnnnnnnnnnnnnnnnnnnnnnnnnnnnnnnnnnnnnnnnnnnnnnnnnnnnnnnnnnnnnnnnnnnnnnnnnnnnnnnnnnnnnnnnnnnnnnnnnnnnnnnnnnnnnnnnnnnnnnnnnnnnnnnnnnnnnnnnnnnnnnnnnnnnnnnnnnnnnnnnnnnnnnnnnnnnnnnnnnnnnnnnnnnnnnnnnnnnnnnnnnnnnnnnnnnnnnnnnnnnnnnnnnnnnnnnnnnnnnnnnnnnnnnnnnnnnnnnnnnnnnnnnnnnnnnnnnnnnnnnnnnnnnnnnnnnnnnnnnnnnnnnnnnnnnnnnnnnnnnnnnnnnnnnnnnnnnnnnnnnnnnnnnnnnnnnnnnnnnnnnnnnnnnnnnnnnnnnnnnnnnnnnnnnnnnnnnnnnnnnnnnnnnnnnnnnnnnnnnnnnnnnnnnnnnnnnnnnnnnnnnnnnnnnnnnnnnnnnnnnnnnnnnnnnnnnnnnnnnnnnnnnnnnnnnnnnnnnnnnnnnnnnnnnnnnnnnnnnnnnnnnnnnnnnnnnnnnnnnnnnnnnnnnnnnnnnnnnnnnnnnnnnnnnnnnnnnnnnnnnnnnnnnnnnnnnnnnnnnnnnnnnnnnnnnnnnnnnnnnnnnnnnnnnnnnnnnnnnnnnnnnnnnnnnnnnnnnnnnnnnnnnnnnnnnnnnnnnnnnnnnnnnnnnnnnnnnnnnnnnnnnnnnnnnnnnnnnnnnnnnnnnnnnnnnnnnnnnnnnnnnnnnnnnnnnnnnnnnnnnnnnnnnnnnnnnnnnnnnnnnnnnnnnnnnnnnnnnnnnnnnnnnnnnnnnnnnnnnnnnnnnnnnnnnnnnnnnnnnnnnnnnnnnnnnnnnnnnnnnnnnnnnnnnnnnnnnnnnnnnnnnnnnnnnnnnnnnnnnnnnnnnnnnnnnnnnnnnnnnnnnnnnnnnnnnnnnnnnnnnnnnnnnnnnnnnnnnnnnnnnnnnnnnnnnnnnnnnnnnnnnnnnnnnnnnnnnnnnnnnnnnnnnnnnnnnnnnnnnnnnnnnnnnnnnnnnnnnnnnnnnnnnnnnnnnnnnnnnnnnnnnnnnnnnnnnnnnnnnnnnnnnnnnnnnnnnnnnnnnnnnnnnnnnnnnnnnnnnnnnnnnnnnnnnnnnnnnnnnnnnnnnnnnnnnnnnnnnnnnnnnnnnnnnnnnnnnnnnnnnnnnnnnnnnnnnnnnnnnnnnnnnnnnnnnnnnnnnnnnnnnnnnnnnnnnnnnnnnnnnnnnnnnnnnnnnnnnnnnnnnnnnnnnnnnnnnnnnnnnnnnnnnnnnnnnnnnnnnnnnnnnnnnnnnnnnnnnnnnnnnnnnnnnnnnnnnnnnnnnnnnnnnnnnnnnnnnnnnnnnnnnnnnnnnnnnnnnnnnnnnnnnnnnnnnnnnnnnnnnnnnnnnnnnnnnnnnnnnnnnnnnnnnnnnnnnnnnnnnnnnnnnnnnnnnnnnnnnnnnnnnnnnnnnnnnnnnnnnnnnnnnnnnnnnnnnnnnnnnnnnnnnnnnnnnnnnnnnnnnnnnnnnnnnnnnnnnnnnnnnnnnnnnnnnnnnnnnnnnnnnnnnnnnnnnnnnnnnnnnnnnnnnnnnnnnnnnnnnnnnnnnnnnnnnnnnnnnnnnnnnnnnnnnnnnnnnnnnnnnnnnnnnnnnnnnnnnnnnnnnnnnnnnnnnnnnnnnnnnnnnnnnnnnnnnnnnnnnnnnnnnnnnnnnnnnnnnnnnnnnnnnnnnnnnnnnnnnnnnnnnnnnnnnnnnnnnnnnnnnnnnnnnnnnnnnnnnnnnnnnnnnnnnnnnnnnnnnnnnnnnnnnnnnnnnnnnnnnnnnnnnnnnnnnnnnnnnnnnnnnnnnnnnnnnnnnnnnnnnnnnnnnnnnnnnnnnnnnnnnnnnnnnnnnnnnnnnnnnnnnnnnnnnnnnnnnnnnnnnnnnnnnnnnnnnnnnnnnnnnnnnnnnnnnnnnnnnnnnnnnnnnnnnnnnnnnnnnnnnnnnnnnnnnnnnnnnnnnnnnnnnnnnnnnnnnnnnnnnnnnnnnnnnnnnnnnnnnnnnnnnnnnnnnnnnnnnnnnnnnnnnnnnnnnnnnnnnnnnnnnnnnnnnnnnnnnnnnnnnnnnnnnnnnnnnnnnnnnnnnnnnnnnnnnnnnnnnnnnnnnnnnnnnnnnnnnnnnnnnnnnnnnnnnnnnnnnnnnnnnnnnnnnnnnnnnnnnnnnnnnnnnnnnnnnnnnnnnnnnnnnnnnnnnnnnnnnnnnnnnnnnnnnnnnnnnnnnnnnnnnnnnnnnnnnnnnnnnnnnnnnnnnnnnnnnnnnnnnnnnnnnnnnnnnnnnnnnnnnnnnnnnnnnnnnnnnnnnnnnnnnnnnnnnnnnnnnnnnnnnnnnnnnnnnnnnnnnnnnnnnnnnnnnnnnnnnnnnnnnnnnnnnnnnnnnnnnnnnnnnnnnnnnnnnnnnnnnnnnnnnnnnnnnnnnnnnnnnnnnnnnnnnnnnnnnnnnnnnnnnnnnnnnnnnnnnnnnnnnnnnnnnnnnnnnnnnnnnnnnnnnnnnnnnnnnnnnnnnnnnnnnnnnnnnnnnnnnnnnnnnnnnnnnnnnnnnnnnnnnnnnnnnnnnnnnnnnnnnnnnnnnnnnnnnnnnnnnnnnnnnnnnnnnnnnnnnnnnnnnnnnnnnnnnnnnnnnnnnnnnnnnnnnnnnnnnnnnnnnnnnnnnnnnnnnnnnnnnnnnnnnnnnnnnnnnnnnnnnnnnnnnnnnnnnnnnnnnnnnnnnnnnnnnnnnnnnnnnnnnnnnnnnnnnnnnnnnnnnnnnnnnnnnnnnnnnnnnnnnnnnnnnnnnnnnnnnnnnnnnnnnnnnnnnnnnnnnnnnnnnnnnnnnnnnnnnnnnnnnnnnnnnnnnnnnnnnnnnnnnnnnnnnnnnnnnnnnnnnnnnnnnnnnnnnnnnnnnnnnnnnnnnnnnnnnnnnnnnnnnnnnnnnnnnnnnnnnnnnnnnnnnnnnnnnnnnnnnnnnnnnnnnnnnnnnnnnnnnnnnnnnnnnnnnnnnnnnnnnnnnnnnnnnnnnnnnnnnnnnnnnnnnnnnnnnnnnnnnnnnnnnnnnnnnnnnnnnnnnnnnnnnnnnnnnnnnnnnnnnnnnnnnnnnnnnnnnnnnnnnnnnnnnnnnnnnnnnnnnnnnnnnnnnnnnnnnnnnnnnnnnnnnnnnnnnnnnnnnnnnnnnnnnnnnnnnnnnnnnnnnnnnnnnnnnnnnnnnnnnnnnnnnnnnnnnnnnnnnnnnnnnnnnnnnnnnnnnnnnnnnnnnnnnnnnnnnnnnnnnnnnnnnnnnnnnnnnnnnnnnnnnnnnnnnnnnnnnnnnnnnnnnnnnnnnnnnnnnnnnnnnnnnnnnnnnnnnnnnnnnnnnnnnnnnnnnnnnnnnnnnnnnnnnnnnnnnnnnnnnnnnnnnnnnnnnnnnnnnnnnnnnnnnnnnnnnnnnnnnnnnnnnnnnnnnnnnnnnnnnnnnnnnnnnnnnnnnnnnnnnnnnnnnnnnnnnnnnnnnnnnnnnnnnnnnnnnnnnnnnnnnnnnnnnnnnnnnnnnnnnnnnnnnnnnnnnnnnnnnnnnnnnnnnnnnnnnnnnnnnnnnnnnnnnnnnnnnnnnnnnnnnnnnnnnnnnnnnnnnnnnnnnnnnnnnnnnnnnnnnnnnnnnnnnnnnnnnnnnnnnnnnnnnnnnnnnnnnnnnnnnnnnnnnnnnnnnnnnnnnnnnnnnnnnnnnnnnnnnnnnnnnnnnnnnnnnnnnnnnnnnnnnnnnnnnnnnnnnnnnnnnnnnnnnnnnnnnnnnnnnnnnnnnnnnnnnnnnnnnnnnnnnnnnnnnnnnnnnnnnnnnnnnnnnnnnnnnnnnnnnnnnnnnnnnnnnnnnnnnnnnnnnnnnnnnnnnnnnnnnnnnnnnnnnnnnnnnnnnnnnnnnnnnnnnnnnnnnnnnnnnnnnnnnnnnnnnnnnnnnnnnnnnnnnnnnnnnnnnnnnnnnnnnnnnnnnnnnnnnnnnnnnnnnnnnnnnnnnnnnnnnnnnnnnnnnnnnnnnnnnnnnnnnnnnnnnnnnnnnnnnnnnnnnnnnnnnnnnnnnnnnnnnnnnnnnnnnnnnnnnnnnnnnnnnnnnnnnnnnnnnnnnnnnnnnnnnnnnnnnnnnnnnnnnnnnnnnnnnnnnnnnnnnnnnnnnnnnnnnnnnnnnnnnnnnnnnnnnnnnnnnnnnnnnnnnnnnnnnnnnnnnnnnnnnnnnnnnnnnnnnnnnnnnnnnnnnnnnnnnnnnnnnnnnnnnnnnnnnnnnnnnnnnnnnnnnnnnnnnnnnnnnnnnnnnnnnnnnnnnnnnnnnnnnnnnnnnnnnnnnnnnnnnnnnnnnnnnnnnnnnnnnnnnnnnnnnnnnnnnnnnnnnnnnnnnnnnnnnnnnnnnnnnnnnnnnnnnnnnnnnnnnnnnnnnnnnnnnnnnnnnnnnnnnnnnnnnnnnnnnnnnnnnnnnnnnnnnnnnnnnnnnnnnnnnnnnnnnnnnnnnnnnnnnnnnnnnnnnnnnnnnnnnnnnnnnnnnnnnnnnnnnnnnnnnnnnnnnnnnnnnnnnnnnnnnnnnnnnnnnnnnnnnnnnnnnnnnnnnnnnnnnnnnnnnnnnnnnnnnnnnnnnnnnnnnnnnnnnnnnnnnnnnnnnnnnnnnnnnnnnnnnnnnnnnnnnnnnnnnnnnnnnnnnnnnnnnnnnnnnnnnnnnnnnnnnnnnnnnnnnnnnnnnnnnnnnnnnnnnnnnnnnnnnnnnnnnnnnnnnnnnnnnnnnnnnnnnnnnnnnnnnnnnnnnnnnnnnnnnnnnnnnnnnnnnnnnnnnnnnnnnnnnnnnnnnnnnnnnnnnnnnnnnnnnnnnnnnnnnnnnnnnnnnnnnnnnnnnnnnnnnnnnnnnnnnnnnnnnnnnnnnnnnnnnnnnnnnnnnnnnnnnnnnnnnnnnnnnnnnnnnnnnnnnnnnnnnnnnnnnnnnnnnnnnnnnnnnnnnnnnnnnnnnnnnnnnnnnnnnnnnnnnnnnnnnnnnnnnnnnnnnnnnnnnnnnnnnnnnnnnnnnnnnnnnnnnnnnnnnnnnnnnnnnnnnnnnnnnnnnnnnnnnnnnnnnnnnnnnnnnnnnnnnnnnnnnnnnnnnnnnnnnnnnnnnnnnnnnnnnnnnnnnnnnnnnnnnnnnnnnnnnnnnnnnnnnnnnnnnnnnnnnnnnnnnnnnnnnnnnnnnnnnnnnnnnnnnnnnnnnnnnnnnnnnnnnnnnnnnnnnnnnnnnnnnnnnnnnnnnnnnnnnnnnnnnnnnnnnnnnnnnnnnnnnnnnnnnnnnnnnnnnnnnnnnnnnnnnnnnnnnnnnnnnnnnnnnnnnnnnnnnnnnnnnnnnnnnnnnnnnnnnnnnnnnnnnnnnnnnnnnnnnnnnnnnnnnnnnnnnnnnnnnnnnnnnnnnnnnnnnnnnnnnnnnnnnnnnnnnnnnnnnnnnnnnnnnnnnnnnnnnnnnnnnnnnnnnnnnnnnnnnnnnnnnnnnnnnnnnnnnnnnnnnnnnnnnnnnnnnnnnnnnnnnnnnnnnnnnnnnnnnnnnnnnnnnnnnnnnnnnnnnnnnnnnnnnnnnnnnnnnnnnnnnnnnnnnnnnnnnnnnnnnnnnnnnnnnnnnnnnnnnnnnnnnnnnnnnnnnnnnnnnnnnnnnnnnnnnnnnnnnnnnnnnnnnnnnnnnnnnnnnnnnnnnnnnnnnnnnnnnnnnnnnnnnnnnnnnnnnnnnnnnnnnnnnnnnnnnnnnnnnnnnnnnnnnnnnnnnnnnnnnnnnnnnnnnnnnnnnnnnnnnnnnnnnnnnnnnnnnnnnnnnnnnnnnnnnnnnnnnnnnnnnnnnnnnnnnnnnnnnnnnnnnnnnnnnnnnnnnnnnnnnnnnnnnnnnnnnnnnnnnnnnnnnnnnnnnnnnnnnnnnnnnnnnnnnnnnnnnnnnnnnnnnnnnnnnnnnnnnnnnnnnnnnnnnnnnnnnnnnnnnnnnnnnnnnnnnnnnnnnnnnnnnnnnnnnnnnnnnnnnnnnnnnnnnnnnnnnnnnnnnnnnnnnnnnnnnnnnnnnnnnnnnnnnnnnnnnnnnnnnnnnnnnnnnnnnnnnnnnnnnnnnnnnnnnnnnnnnnnnnnnnnnnnnnnnnnnnnnnnnnnnnnnnnnnnnnnnnnnnnnnnnnnnnnnnnnnnnnnnnnnnnnnnnnnnnnnnnnnnnnnnnnnnnnnnnnnnnnnnnnnnnnnnnnnnnnnnnnnnnnnnnnnnnnnnnnnnnnnnnnnnnnnnnnnnnnnnnnnnnnnnnnnnnnnnnnnnnnnnnnnnnnnnnnnnnnnnnnnnnnnnnnnnnnnnnnnnnnnnnnnnnnnnnnnnnnnnnnnnnnnnnnnnnnnnnnnnnnnnnnnnnnnnnnnnnnnnnnnnnnnnnnnnnnnnnnnnnnnnnnnnnnnnnnnnnnnnnnnnnnnnnnnnnnnnnnnnnnnnnnnnnnnnnnnnnnnnnnnnnnnnnnnnnnnnnnnnnnnnnnnnnnnnnnnnnnnnnnnnnnnnnnnnnnnnnnnnnnnnnnnnnnnnnnnnnnnnnnnnnnnnnnnnnnnnnnnnnnnnnnnnnnnnnnnnnnnnnnnnnnnnnnnnnnnnnnnnnnnnnnnnnnnnnnnnnnnnnnnnnnnnnnnnnnnnnnnnnnnnnnnnnnnnnnnnnnnnnnnnnnnnnnnnnnnnnnnnnnnnnnnnnnnnnnnnnnnnnnnnnnnnnnnnnnnnnnnnnnnnnnnnnnnnnnnnnnnnnnnnnnnnnnnnnnnnnnnnnnnnnnnnnnnnnnnnnnnnnnnnnnnnnnnnnnnnnnnnnnnnnnnnnnnnnnnnnnnnnnnnnnnnnnnnnnnnnnnnnnnnnnnnnnnnnnnnnnnnnnnnnnnnnnnnnnnnnnnnnnnnnnnnnnnnnnnnnnnnnnnnnnnnnnnnnnnnnnnnnnnnnnnnnnnnnnnnnnnnnnnnnnnnnnnnnnnnnnnnnnnnnnnnnnnnnnnnnnnnnnnnnnnnnnnnnnnnnnnnnnnnnnnnnnnnnnnnnnnnnnnnnnnnnnnnnnnnnnnnnnnnnnnnnnnnnnnnnnnnnnnnnnnnnnnnnnnnnnnnnnnnnnnnnnnnnnnnnnnnnnnnnnnnnnnnnnnnnnnnnnnnnnnnnnnnnnnnnnnnnnnnnnnnnnnnnnnnnnnnnnnnnnnnnnnnnnnnnnnnnnnnnnnnnnnnnnnnnnnnnnnnnnnnnnnnnnnnnnnnnnnnnnnnnnnnnnnnnnnnnnnnnnnnnnnnnnnnnnnnnnnnnnnnnnnnnnnnnnnnnnnnnnnnnnnnnnnnnnnnnnnnnnnnnnnnnnnnnnnnnnnnnnnnnnnnnnnnnnnnnnnnnnnnnnnnnnnnnnnnnnnnnnnnnnnnnnnnnnnnnnnnnnnnnnnnnnnnnnnnnnnnnnnnnnnnnnnnnnnnnnnnnnnnnnnnnnnnnnnnnnnnnnnnnnnnnnnnnnnnnnnnnnnnnnnnnnnnnnnnnnnnnnnnnnnnnnnnnnnnnnnnnnnnnnnnnnnnnnnnnnnnnnnnnnnnnnnnnnnnnnnnnnnnnnnnnnnnnnnnnnnnnnnnnnnnnnnnnnnnnnnnnnnnnnnnnnnnnnnnnnnnnnnnnnnnnnnnnnnnnnnnnnnnnnnnnnnnnnnnnnnnnnnnnnnnnnnnnnnnnnnnnnnnnnnnnnnnnnnnnnnnnnnnnnnnnnnnnnnnnnnnnnnnnnnnnnnnnnnnnnnnnnnnnnnnnnnnnnnnnnnnnnnnnnnnnnnnnnnnnnnnnnnnnnnnnnnnnnnnnnnnnnnnnnnnnnnnnnnnnnnnnnnnnnnnnnnnnnnnnnnnnnnnnnnnnnnnnnnnnnnnnnnnnnnnnnnnnnnnnnnnnnnnnnnnnnnnnnnnnnnnnnnnnnnnnnnnnnnnnnnnnnnnnnnnnnnnnnnnnnnnnnnnnnnnnnnnnnnnnnnnnnnnnnnnnnnnnnnnnnnnnnnnnnnnnnnnnnnnnnnnnnnnnnnnnnnnnnnnnnnnnnnnnnnnnnnnnnnnnnnnnnnnnnnnnnnnnnnnnnnnnnnnnnnnnnnnnnnnnnnnnnnnnnnnnnnnnnnnnnnnnnnnnnnnnnnnnnnnnnnnnnnnnnnnnnnnnnnnnnnnnnnnnnnnnnnnnnnnnnnnnnnnnnnnnnnnnnnnnnnnnnnnnnnnnnnnnnnnnnnnnnnnnnnnnnnnnnnnnnnnnnnnnnnnnnnnnnnnnnnnnnnnnnnnnnnnnnnnnnnnnnnnnnnnnnnnnnnnnnnnnnnnnnnnnnnnnnnnnnnnnnnnnnnnnnnnnnnnnnnnnnnnnnnnnnnnnnnnnnnnnnnnnnnnnnnnnnnnnnnnnnnnnnnnnnnnnnnnnnnnnnnnnnnnnnnnnnnnnnnnnnnnnnnnnnnnnnnnnnnnnnnnnnnnnnnnnnnnnnnnnnnnnnnnnnnnnnnnnnnnnnnnnnnnnnnnnnnnnnnnnnnnnnnnnnnnnnnnnnnnnnnnnnnnnnnnnnnnnnnnnnnnnnnnnnnnnnnnnnnnnnnnnnnnnnnnnnnnnnnnnnnnnnnnnnnnnnnnnnnnnnnnnnnnnnnnnnnnnnnnnnnnnnnnnnnnnnnnnnnnnnnnnnnnnnnnnnnnnnnnnnnnnnnnnnnnnnnnnnnnnnnnnnnnnnnnnnnnnnnnnnnnnnnnnnnnnnnnnnnnnnnnnnnnnnnnnnnnnnnnnnnnnnnnnnnnnnnnnnnnnnnnnnnnnnnnnnnnnnnnnnnnnnnnnnnnnnnnnnnnnnnnnnnnnnnnnnnnnnnnnnnnnnnnnnnnnnnnnnnnnnnnnnnnnnnnnnnnnnnnnnnnnnnnnnnnnnnnnnnnnnnnnnnnnnnnnnnnnnnnnnnnnnnnnnnnnnnnnnnnnnnnnnnnnnnnnnnnnnnnnnnnnnnnnnnnnnnnnnnnnnnnnnnnnnnnnnnnnnnnnnnnnnnnnnnnnnnnnnnnnnnnnnnnnnnnnnnnnnnnnnnnnnnnnnnnnnnnnnnnnnnnnnnnnnnnnnnnnnnnnnnnnnnnnnnnnnnnnnnnnnnnnnnnnnnnnnnnnnnnnnnnnnnnnnnnnnnnnnnnnnnnnnnnnnnnnnnnnnnnnnnnnnnnnnnnnnnnnnnnnnnnnnnnnnnnnnnnnnnnnnnnnnnnnnnnnnnnnnnnnnnnnnnnnnnnnnnnnnnnnnnnnnnnnnnnnnnnnnnnnnnnnnnnnnnnnnnnnnnnnnnnnnnnnnnnnnnnnnnnnnnnnnnnnnnnnnnnnnnnnnnnnnnnnnnnnnnnnnnnnnnnnnnnnnnnnnnnnnnnnnnnnnnnnnnnnnnnnnnnnnnnnnnnnnnnnnnnnnnnnnnnnnnnnnnnnnnnnnnnnnnnnnnnnnnnnnnnnnnnnnnnnnnnnnnnnnnnnnnnnnnnnnnnnnnnnnnnnnnnnnnnnnnnnnnnnnnnnnnnnnnnnnnnnnnnnnnnnnnnnnnnnnnnnnnnnnnnnnnnnnnnnnnnnnnnnnnnnnnnnnnnnnnnnnnnnnnnnnnnnnnnnnnnnnnnnnnnnnnnnnnnnnnnnnnnnnnnnnnnnnnnnnnnnnnnnnnnnnnnnnnnnnnnnnnnnnnnnnnnnnnnnnnnnnnnnnnnnnnnnnnnnnnnnnnnnnnnnnnnnnnnnnnnnnnnnnnnnnnnnnnnnnnnnnnnnnnnnnnnnnnnnnnnnnnnnnnnnnnnnnnnnnnnnnnnnnnnnnnnnnnnnnnnnnnnnnnnnnnnnnnnnnnnnnnnnnnnnnnnnnnnnnnnnnnnnnnnnnnnnnnnnnnnnnnnnnnnnnnnnnnnnnnnnnnnnnnnnnnnnnnnnnnnnnnnnnnnnnnnnnnnnnnnnnnnnnnnnnnnnnnnnnnnnnnnnnnnnnnnnnnnnnnnnnnnnnnnnnnnnnnnnnnnnnnnnnnnnnnnnnnnnnnnnnnnnnnnnnnnnnnnnnnnnnnnnnnnnnnnnnnnnnnnnnnnnnnnnnnnnnnnnnnnnnnnnnnnnnnnnnnnnnnnnnnnnnnnnnnnnnnnnnnnnnnnnnnnnnnnnnnnnnnnnnnnnnnnnnnnnnnnnnnnnnnnnnnnnnnnnnnnnnnnnnnnnnnnnnnnnnnnnnnnnnnnnnnnnnnnnnnnnnnnnnnnnnnnnnnnnnnnnnnnnnnnnnnnnnnnnnnnnnnnnnnnnnnnnnnnnnnnnnnnnnnnnnnnnnnnnnnnnnnnnnnnnnnnnnnnnnnnnnnnnnnnnnnnnnnnnnnnnnnnnnnnnnnnnnnnnnnnnnnnnnnnnnnnnnnnnnnnnnnnnnnnnnnnnnnnnnnnnnnnnnnnnnnnnnnnnnnnnnnnnnnnnnnnnnnnnnnnnnnnnnnnnnnnnnnnnnnnnnnnnnnnnnnnnnnnnnnnnnnnnnnnnnnnnnnnnnnnnnnnnnnnnnnnnnnnnnnnnnnnnnnnnnnnnnnnnnnnnnnnnnnnnnnnnnnnnnnnnnnnnnnnnnnnnnnnnnnnnnnnnnnnnnnnnnnnnnnnnnnnnnnnnnnnnnnnnnnnnnnnnnnnnnnnnnnnnnnnnnnnnnnnnnnnnnnnnnnnnnnnnnnnnnnnnnnnnnnnnnnnnnnnnnnnnnnnnnnnnnnnnnnnnnnnnnnnnnnnnnnnnnnnnnnnnnnnnnnnnnnnnnnnnnnnnnnnnnnnnnnnnnnnnnnnnnnnnnnnnnnnnnnnnnnnnnnnnnnnnnnnnnnnnnnnnnnnnnnnnnnnnnnnnnnnnnnnnnnnnnnnnnnnnnnnnnnnnnnnnnnnnnnnnnnnnnnnnnnnnnnnnnnnnnnnnnnnnnnnnnnnnnnnnnnnnnnnnnnnnnnnnnnnnnnnnnnnnnnnnnnnnnnnnnnnnnnnnnnnnnnnnnnnnnnnnnnnnnnnnnnnnnnnnnnnnnnnnnnnnnnnnnnnnnnnnnnnnnnnnnnnnnnnnnnnnnnnnnnnnnnnnnnnnnnnnnnnnnnnnnnnnnnnnnnnnnnnnnnnnnnnnnnnnnnnnnnnnnnnnnnnnnnnnnnnnnnnnnnnnnnnnnnnnnnnnnnnnnnnnnnnnnnnnnnnnnnnnnnnnnnnnnnnnnnnnnnnnnnnnnnnnnnnnnnnnnnnnnnnnnnnnnnnnnnnnnnnnnnnnnnnnnnnnnnnnnnnnnnnnnnnnnnnnnnnnnnnnnnnnnnnnnnnnnnnnnnnnnnnnnnnnnnnnnnnnnnnnnnnnnnnnnnnnnnnnnnnnnnnnnnnnnnnnnnnnnnnnnnnnnnnnnnnnnnnnnnnnnnnnnnnnnnnnnnnnnnnnnnnnnnnnnnnnnnnnnnnnnnnnnnnnnnnnnnnnnnnnnnnnnnnnnnnnnnnnnnnnnnnnnnnnnnnnnnnnnnnnnnnnnnnnnnnnnnnnnnnnnnnnnnnnnnnnnnnnnnnnnnnnnnnnnnnnnnnnnnnnnnnnnnnnnnnnnnnnnnnnnnnnnnnnnnnnnnnnnnnnnnnnnnnnnnnnnnnnnnnnnnnnnnnnnnnnnnnnnnnnnnnnnnnnnnnnnnnnnnnnnnnnnnnnnnnnnnnnnnnnnnnnnnnnnnnnnnnnnnnnnnnnnnnnnnnnnnnnnnnnnnnnnnnnnnnnnnnnnnnnnnnnnnnnnnnnnnnnnnnnnnnnnnnnnnnnnnnnnnnnnnnnnnnnnnnnnnnnnnnnnnnnnnnnnnnnnnnnnnnnnnnnnnnnnnnnnnnnnnnnnnnnnnnnnnnnnnnnnnnnnnnnnnnnnnnnnnnnnnnnnnnnnnnnnnnnnnnnnnnnnnnnnnnnnnnnnnnnnnnnnnnnnnnnnnnnnnnnnnnnnnnnnnnnnnnnnnnnnnnnnnnnnnnnnnnnnnnnnnnnnnnnnnnnnnnnnnnnnnnnnnnnnnnnnnnnnnnnnnnnnnnnnnnnnnnnnnnnnnnnnnnnnnnnnnnnnnnnnnnnnnnnnnnnnnnnnnnnnnnnnnnnnnnnnnnnnnnnnnnnnnnnnnnnnnnnnnnnnnnnnnnnnnnnnnnnnnnnnnnnnnnnnnnnnnnnnnnnnnnnnnnnnnnnnnnnnnnnnnnnnnnnnnnnnnnnnnnnnnnnnnnnnnnnnnnnnnnnnnnnnnnnnnnnnnnnnnnnnnnnnnnnnnnnnnnnnnnnnnnnnnnnnnnnnnnnnnnnnnnnnnnnnnnnnnnnnnnnnnnnnnnnnnnnnnnnnnnnnnnnnnnnnnnnnnnnnnnnnnnnnnnnnnnnnnnnnnnnnnnnnnnnnnnnnnnnnnnnnnnnnnnnnnnnnnnnnnnnnnnnnnnnnnnnnnnnnnnnnnnnnnnnnnnnnnnnnnnnnnnnnnnnnnnnnnnnnnnnnnnnnnnnnnnnnnnnnnnnnnnnnnnnnnnnnnnnnnnnnnnnnnnnnnnnnnnnnnnnnnnnnnnnnnnnnnnnnnnnnnnnnnnnnnnnnnnnnnnnnnnnnnnnnnnnnnnnnnnnnnnnnnnnnnnnnnnnnnnnnnnnnnnnnnnnnnnnnnnnnnnnnnnnnnnnnnnnnnnnnnnnnnnnnnnnnnnnnnnnnnnnnnnnnnnnnnnnnnnnnnnnnnnnnnnnnnnnnnnnnnnnnnnnnnnnnnnnnnnnnnnnnnnnnnnnnnnnnnnnnnnnnnnnnnnnnnnnnnnnnnnnnnnnnnnnnnnnnnnnnnnnnnnnnnnnnnnnnnnnnnnnnnnnnnnnnnnnnnnnnnnnnnnnnnnnnnnnnnnnnnnnnnnnnnnnnnnnnnnnnnnnnnnnnnnnnnnnnnnnnnnnnnnnnnnnnnnnnnnnnnnnnnnnnnnnnnnnnnnnnnnnnnnnnnnnnnnnnnnnnnnnnnnnnnnnnnnnnnnnnnnnnnnnnnnnnnnnnnnnnnnnnnnnnnnnnnnnnnnnnnnnnnnnnnnnnnnnnnnnnnnnnnnnnnnnnnnnnnnnnnnnnnnnnnnnnnnnnnnnnnnnnnnnnnnnnnnnnnnnnnnnnnnnnnnnnnnnnnnnnnnnnnnnnnnnnnnnnnnnnnnnnnnnnnnnnnnnnnnnnnnnnnnnnnnnnnnnnnnnnnnnnnnnnnnnnnnnnnnnnnnnnnnnnnnnnnnnnnnnnnnnnnnnnnnnnnnnnnnnnnnnnnnnnnnnnnnnnnnnnnnnnnnnnnnnnnnnnnnnnnnnnnnnnnnnnnnnnnnnnnnnnnnnnnnnnnnnnnnnnnnnnnnnnnnnnnnnnnnnnnnnnnnnnnnnnnnnnnnnnnnnnnnnnnnnnnnnnnnnnnnnnnnnnnnnnnnnnnnnnnnnnnnnnnnnnnnnnnnnnnnnnnnnnnnnnnnnnnnnnnnnnnnnnnnnnnnnnnnnnnnnnnnnnnnnnnnnnnnnnnnnnnnnnnnnnnnnnnnnnnnnnnnnnnnnnnnnnnnnnnnnnnnnnnnnnnnnnnnnnnnnnnnnnnnnnnnnnnnnnnnnnnnnnnnnnnnnnnnnnnnnnnnnnnnnnnnnnnnnnnnnnnnnnnnnnnnnnnnnnnnnnnnnnnnnnnnnnnnnnnnnnnnnnnnnnnnnnnnnnnnnnnnnnnnnnnnnnnnnnnnnnnnnnnnnnnnnnnnnnnnnnnnnnnnnnnnnnnnnnnnnnnnnnnnnnnnnnnnnnnnnnnnnnnnnnnnnnnnnnnnnnnnnnnnnnnnnnnnnnnnnnnnnnnnnnnnnnnnnnnnnnnnnnnnnnnnnnnnnnnnnnnnnnnnnnnnnnnnnnnnnnnnnnnnnnnnnnnnnnnnnnnnnnnnnnnnnnnnnnnnnnnnnnnnnnnnnnnnnnnnnnnnnnnnnnnnnnnnnnnnnnnnnnnnnnnnnnnnnnnnnnnnnnnnnnnnnnnnnnnnnnnnnnnnnnnnnnnnnnnnnnnnnnnnnnnnnnnnnnnnnnnnnnnnnnnnnnnnnnnnnnnnnnnnnnnnnnnnnnnnnnnnnnnnnnnnnnnnnnnnnnnnnnnnnnnnnnnnnnnnnnnnnnnnnnnnnnnnnnnnnnnnnnnnnnnnnnnnnnnnnnnnnnnnnnnnnnnnnnnnnnnnnnnnnnnnnnnnnnnnnnnnnnnnnnnnnnnnnnnnnnnnnnnnnnnnnnnnnnnnnnnnnnnnnnnnnnnnnnnnnnnnnnnnnnnnnnnnnnnnnnnnnnnnnnnnnnnnnnnnnnnnnnnnnnnnnnnnnnnnnnnnnnnnnnnnnnnnnnnnnnnnnnnnnnnnnnnnnnnnnnnnnnnnnnnnnnnnnnnnnnnnnnnnnnnnnnnnnnnnnnnnnnnnnnnnnnnnnnnnnnnnnnnnnnnnnnnnnnnnnnnnnnnnnnnnnnnnnnnnnnnnnnnnnnnnnnnnnnnnnnnnnnnnnnnnnnnnnnnnnnnnnnnnnnnnnnnnnnnnnnnnnnnnnnnnnnnnnnnnnnnnnnnnnnnnnnnnnnnnnnnnnnnnnnnnnnnnnnnnnnnnnnnnnnnnnnnnnnnnnnnnnnnnnnnnnnnnnnnnnnnnnnnnnnnnnnnnnnnnnnnnnnnnnnnnnnnnnnnnnnnnnnnnnnnnnnnnnnnnnnnnnnnnnnnnnnnnnnnnnnnnnnnnnnnnnnnnnnnnnnnnnnnnnnnnnnnnnnnnnnnnnnnnnnnnnnnnnnnnnnnnnnnnnnnnnnnnnnnnnnnnnnnnnnnnnnnnnnnnnnnnnnnnnnnnnnnnnnnnnnnnnnnnnnnnnnnnnnnnnnnnnnnnnnnnnnnnnnnnnnnnnnnnnnnnnnnnnnnnnnnnnnnnnnnnnnnnnnnnnnnnnnnnnnnnnnnnnnnnnnnnnnnnnnnnnnnnnnnnnnnnnnnnnnnnnnnnnnnnnnnnnnnnnnnnnnnnnnnnnnnnnnnnnnnnnnnnnnnnnnnnnnnnnnnnnnnnnnnnnnnnnnnnnnnnnnnnnnnnnnnnnnnnnnnnnnnnnnnnnnnnnnnnnnnnnnnnnnnnnnnnnnnnnnnnnnnnnnnnnnnnnnnnnnnnnnnnnnnnnnnnnnnnnnnnnnnnnnnnnnnnnnnnnnnnnnnnnnnnnnnnnnnnnnnnnnnnnnnnnnnnnnnnnnnnnnnnnnnnnnnnnnnnnnnnnnnnnnnnnnnnnnnnnnnnnnnnnnnnnnnnnnnnnnnnnnnnnnnnnnnnnnnnnnnnnnnnnnnnnnnnnnnnnnnnnnnnnnnnnnnnnnnnnnnnnnnnnnnnnnnnnnnnnnnnnnnnnnnnnnnnnnnnnnnnnnnnnnnnnnnnnnnnnnnnnnnnnnnnnnnnnnnnnnnnnnnnnnnnnnnnnnnnnnnnnnnnnnnnnnnnnnnnnnnnnnnnnnnnnnnnnnnnnnnnnnnnnnnnnnnnnnnnnnnnnnnnnnnnnnnnnnnnnnnnnnnnnnnnnnnnnnnnnnnnnnnnnnnnnnnnnnnnnnnnnnnnnnnnnnnnnnnnnnnnnnnnnnnnnnnnnnnnnnnnnnnnnnnnnnnnnnnnnnnnnnnnnnnnnnnnnnnnnnnnnnnnnnnnnnnnnnnnnnnnnnnnnnnnnnnnnnnnnnnnnnnnnnnnnnnnnnnnnnnnnnnnnnnnnnnnnnnnnnnnnnnnnnnnnnnnnnnnnnnnnnnnnnnnnnnnnnnnnnnnnnnnnnnnnnnnnnnnnnnnnnnnnnnnnnnnnnnnnnnnnnnnnnnnnnnnnnnnnnnnnnnnnnnnnnnnnnnnnnnnnnnnnnnnnnnnnnnnnnnnnnnnnnnnnnnnnnnnnnnnnnnnnnnnnnnnnnnnnnnnnnnnnnnnnnnnnnnnnnnnnnnnnnnnnnnnnnnnnnnnnnnnnnnnnnnnnnnnnnnnnnnnnnnnnnnnnnnnnnnnnnnnnnnnnnnnnnnnnnnnnnnnnnnnnnnnnnnnnnnnnnnnnnnnnnnnnnnnnnnnnnnnnnnnnnnnnnnnnnnnnnnnnnnnnnnnnnnnnnnnnnnnnnnnnnnnnnnnnnnnnnnnnnnnnnnnnnnnnnnnnnnnnnnnnnnnnnnnnnnnnnnnnnnnnnnnnnnnnnnnnnnnnnnnnnnnnnnnnnnnnnnnnnnnnnnnnnnnnnnnnnnnnnnnnnnnnnnnnnnnnnnnnnnnnnnnnnnnnnnnnnnnnnnnnnnnnnnnnnnnnnnnnnnnnnnnnnnnnnnnnnnnnnnnnnnnnnnnnnnnnnnnnnnnnnnnnnnnnnnnnnnnnnnnnnnnnnnnnnnnnnnnnnnnnnnnnnnnnnnnnnnnnnnnnnnnnnnnnnnnnnnnnnnnnnnnnnnnnnnnnnnnnnnnnnnnnnnnnnnnnnnnnnnnnnnnnnnnnnnnnnnnnnnnnnnnnnnnnnnnnnnnnnnnnnnnnnnnnnnnnnnnnnnnnnnnnnnnnnnnnnnnnnnnnnnnnnnnnnnnnnnnnnnnnnnnnnnnnnnnnnnnnnnnnnnnnnnnnnnnnnnnnnnnnnnnnnnnnnnnnnnnnnnnnnnnnnnnnnnnnnnnnnnnnnnnnnnnnnnnnnnnnnnnnnnnnnnnnnnnnnnnnnnnnnnnnnnnnnnnnnnnnnnnnnnnnnnnnnnnnnnnnnnnnnnnnnnnnnnnnnnnnnnnnnnnnnnnnnnnnnnnnnnnnnnnnnnnnnnnnnnnnnnnnnnnnnnnnnnnnnnnnnnnnnnnnnnnnnnnnnnnnnnnnnnnnnnnnnnnnnnnnnnnnnnnnnnnnnnnnnnnnnnnnnnnnnnnnnnnnnnnnnnnnnnnnnnnnnnnnnnnnnnnnnnnnnnnnnnnnnnnnnnnnnnnnnnnnnnnnnnnnnnnnnnnnnnnnnnnnnnnnnnnnnnnnnnnnnnnnnnnnnnnnnnnnnnnnnnnnnnnnnnnnnnnnnnnnnnnnnnnnnnnnnnnnnnnnnnnnnnnnnnnnnnnnnnnnnnnnnnnnnnnnnnnnnnnnnnnnnnnnnnnnnnnnnnnnnnnnnnnnnnnnnnnnnnnnnnnnnnnnnnnnnnnnnnnnnnnnnnnnnnnnnnnnnnnnnnnnnnnnnnnnnnnnnnnnnnnnnnnnnnnnnnnnnnnnnnnnnnnnnnnnnnnnnnnnnnnnnnnnnnnnnnnnnnnnnnnnnnnnnnnnnnnnnnnnnnnnnnnnnnnnnnnnnnnnnnnnnnnnnnnnnnnnnnnnnnnnnnnnnnnnnnnnnnnnnnnnnnnnnnnnnnnnnnnnnnnnnnnnnnnnnnnnnnnnnnnnnnnnnnnnnnnnnnnnnnnnnnnnnnnnnnnnnnnnnnnnnnnnnnnnnnnnnnnnnnnnnnnnnnnnnnnnnnnnnnnnnnnnnnnnnnnnnnnnnnnnnnnnnnnnnnnnnnnnnnnnnnnnnnnnnnnnnnnnnnnnnnnnnnnnnnnnnnnnnnnnnnnnnnnnnnnnnnnnnnnnnnnnnnnnnnnnnnnnnnnnnnnnnnnnnnnnnnnnnnnnnnnnnnnnnnnnnnnnnnnnnnnnnnnnnnnnnnnnnnnnnnnnnnnnnnnnnnnnnnnnnnnnnnnnnnnnnnnnnnnnnnnnnnnnnnnnnnnnnnnnnnnnnnnnnnnnnnnnnnnnnnnnnnnnnnnnnnnnnnnnnnnnnnnnnnnnnnnnnnnnnnnnnnnnnnnnnnnnnnnnnnnnnnnnnnnnnnnnnnnnnnnnnnnnnnnnnnnnnnnnnnnnnnnnnnnnnnnnnnnnnnnnnnnnnnnnnnnnnnnnnnnnnnnnnnnnnnnnnnnnnnnnnnnnnnnnnnnnnnnnnnnnnnnnnnnnnnnnnnnnnnnnnnnnnnnnnnnnnnnnnnnnnnnnnnnnnnnnnnnnnnnnnnnnnnnnnnnnnnnnnnnnnnnnnnnnnnnnnnnnnnnnnnnnnnnnnnnnnnnnnnnnnnnnnnnnnnnnnnnnnnnnnnnnnnnnnnnnnnnnnnnnnnnnnnnnnnnnnnnnnnnnnnnnnnnnnnnnnnnnnnnnnnnnnnnnnnnnnnnnnnnnnnnnnnnnnnnnnnnnnnnnnnnnnnnnnnnnnnnnnnnnnnnnnnnnnnnnnnnnnnnnnnnnnnnnnnnnnnnnnnnnnnnnnnnnnnnnnnnnnnnnnnnnnnnnnnnnnnnnnnnnnnnnnnnnnnnnnnnnnnnnnnnnnnnnnnnnnnnnnnnnnnnnnnnnnnnnnnnnnnnnnnnnnnnnnnnnnnnnnnnnnnnnnnnnnnnnnnnnnnnnnnnnnnnnnnnnnnnnnnnnnnnnnnnnnnnnnnnnnnnnnnnnnnnnnnnnnnnnnnnnnnnnnnnnnnnnnnnnnnnnnnnnnnnnnnnnnnnnnnnnnnnnnnnnnnnnnnnnnnnnnnnnnnnnnnnnnnnnnnnnnnnnnnnnnnnnnnnnnnnnnnnnnnnnnnnnnnnnnnnnnnnnnnnnnnnnnnnnnnnnnnnnnnnnnnnnnnnnnnnnnnnnnnnnnnnnnnnnnnnnnnnnnnnnnnnnnnnnnnnnnnnnnnnnnnnnnnnnnnnnnnnnnnnnnnnnnnnnnnnnnnnnnnnnnnnnnnnnnnnnnnnnnnnnnnnnnnnnnnnnnnnnnnnnnnnnnnnnnnnnnnnnnnnnnnnnnnnnnnnnnnnnnnnnnnnnnnnnnnnnnnnnnnnnnnnnnnnnnnnnnnnnnnnnnnnnnnnnnnnnnnnnnnnnnnnnnnnnnnnnnnnnnnnnnnnnnnnnnnnnnnnnnnnnnnnnnnnnnnnnnnnnnnnnnnnnnnnnnnnnnnnnnnnnnnnnnnnnnnnnnnnnnnnnnnnnnnnnnnnnnnnnnnnnnnnnnnnnnnnnnnnnnnnnnnnnnnnnnnnnnnnnnnnnnnnnnnnnnnnnnnnnnnnnnnnnnnnnnnnnnnnnnnnnnnnnnnnnnnnnnnnnnnnnnnnnnnnnnnnnnnnnnnnnnnnnnnnnnnnnnnnnnnnnnnnnnnnnnnnnnnnnnnnnnnnnnnnnnnnnnnnnnnnnnnnnnnnnnnnnnnnnnnnnnnnnnnnnnnnnnnnnnnnnnnnnnnnnnnnnnnnnnnnnnnnnnnnnnnnnnnnnnnnnnnnnnnnnnnnnnnnnnnnnnnnnnnnnnnnnnnnnnnnnnnnnnnnnnnnnnnnnnnnnnnnnnnnnnnnnnnnnnnnnnnnnnnnnnnnnnnnnnnnnnnnnnnnnnnnnnnnnnnnnnnnnnnnnnnnnnnnnnnnnnnnnnnnnnnnnnnnnnnnnnnnnnnnnnnnnnnnnnnnnnnnnnnnnnnnnnnnnnnnnnnnnnnnnnnnnnnnnnnnnnnnnnnnnnnnnnnnnnnnnnnnnnnnnnnnnnnnnnnnnnnnnnnnnnnnnnnnnnnnnnnnnnnnnnnnnnnnnnnnnnnnnnnnnnnnnnnnnnnnnnnnnnnnnnnnnnnnnnnnnnnnnnnnnnnnnnnnnnnnnnnnnnnnnnnnnnnnnnnnnnnnnnnnnnnnnnnnnnnnnnnnnnnnnnnnnnnnnnnnnnnnnnnnnnnnnnnnnnnnnnnnnnnnnnnnnnnnnnnnnnnnnnnnnnnnnnnnnnnnnnnnnnnnnnnnnnnnnnnnnnnnnnnnnnnnnnnnnnnnnnnnnnnnnnnnnnnnnnnnnnnnnnnnnnnnnnnnnnnnnnnnnnnnnnnnnnnnnnnnnnnnnnnnnnnnnnnnnnnnnnnnnnnnnnnnnnnnnnnnnnnnnnnnnnnnnnnnnnnnnnnnnnnnnnnnnnnnnnnnnnnnnnnnnnnnnnnnnnnnnnnnnnnnnnnnnnnnnnnnnnnnnnnnnnnnnnnnnnnnnnnnnnnnnnnnnnnnnnnnnnnnnnnnnnnnnnnnnnnnnnnnnnnnnnnnnnnnnnnnnnnnnnnnnnnnnnnnnnnnnnnnnnnnnnnnnnnnnnnnnnnnnnnnnnnnnnnnnnnnnnnnnnnnnnnnnnnnnnnnnnnnnnnnnnnnnnnnnnnnnnnnnnnnnnnnnnnnnnnnnnnnnnnnnnnnnnnnnnnnnnnnnnnnnnnnnnnnnnnnnnnnnnnnnnnnnnnnnnnnnnnnnnnnnnnnnnnnnnnnnnnnnnnnnnnnnnnnnnnnnnnnnnnnnnnnnnnnnnnnnnnnnnnnnnnnnnnnnnnnnnnnnnnnnnnnnnnnnnnnnnnnnnnnnnnnnnnnnnnnnnnnnnnnnnnnnnnnnnnnnnnnnnnnnnnnnnnnnnnnnnnnnnnnnnnnnnnnnnnnnnnnnnnnnnnnnnnnnnnnnnnnnnnnnnnnnnnnnnnnnnnnnnnnnnnntttgccgccccgctggatcacttggacggtggaatgataacccatgcttggcctccccgccggaagtgcggtcagaggctaatatatcatagctgtatagctaagacaagaaaatttcttaatttttcgattttcttgattttttcacagcttctttttgtcgggatgtatgcgccacagggacgatatattgttggggtgggttctacgacatgaacatctggagccccaagaagcgagacgagaaattgaatcacaggcgcgacaatcccgtcaaacgagtgctggtcaagcacccgggcgactggccgtggtcgcgctgcggcgggaggttctatttctggaatgatggttcgatcttgagcatggacaagaggctatgaaggtgtcgacatgccgaggggcgcatacatcccgacaaaaacccgtcgggacgtatgcgccacccgcgaaatcgatcgcaagattccctccgaatcggaacgccgcggaggcatcaaagcttctgcgcttagtcaacggcgcgccttgcagcctgtgaagtgtgggctaagcggacgcgataaccgttgtcgtggtcttcgggccttgcctttgccgcgtcccgggtgtataccttcgccatgattgtcctgtggtagctacgcagcggacggtccggtccccccggggcgcgacgggcctgccacccgcctcttgcccaggcaaggaggaagccgtggagtacaacctgctcgaagaaaagtggattcccgttctgtggaaagatgggcacagcggtcgcgtgggcattagtgaggcccttaggcaagcaggccggattcgccaaatcgcggccagcaacccaatggaccgcctggccatcctgcgtttcctgcttgcgttgctctattggtgcaaagggaatcccccggacgacaagaactcgatttcttcgtttccctctgattggttcaagaaactcgatgacaacaaagactgtttcaaccttcagggcgatgggaagcggttttaccaacgcaagcctaaccgacttgagaagaagctgtccgtcaactatctgatgcaagaagtgccgaccggcacaaacttctggcacttccggcatgggacagatttcagaaacggcttatgtccggcatgctgcgcaatgggcttgttgcgccttccgctctttgctacgtcggccgggcgcggcaagcccccgggcgtcaatcaaaaaccgccgatctacatcgtgccgatgggcgactgcctttccgaaaccctgcgcctctcatggcggaagacgtcggagatgaacctgggcacgcccacatgggaaaatccggacataagcctccctcaacacggcaatgttccattattgataggattaacgtgggtaccgcggcgcgtctggttagacactccggagacaccagagtccaactgcatcgcctgcgggcgcagggaggctctgatacgtcaatgtgtctttgcgggtattgggagcacaaagacaggcgaaggcagtctggcacgaatctggaacgacccgcacaccatcagcgaaggcgacgagattgtgaagcctttcagcgcgcttggcccggccgacgctgcggctgggaagtggacgaaggtcgtggcgggaatcctgtgcggggaaaagccgaaggggaacagtaagttgtgggtcgtcagctttgcgacagtgcagaacgacaaatacctggaagcagccgagcgggagattcaattcttggccgcgctcgacgacgtgaaggttcaggcgagtttgcaagaaatccaggcgtggcagaaggaaggctggaagctcgttggcagagccaaaccgcgagagacttcacgaaacagaggacaccttgaaattctctccgcagtcgccgctgttcgtccccaagccgaggcaacggtttccggaaaaatcgacgagatgatcgcagaaggcggtaaggcatgggaagaggcggcccaggaatatcgtccgttgatggccgccgtcgccaaatcgctttccccgggctacacaaccgcttccctccggaggcgacaagaaattgccgctgtaaagccggacatgcggccaaagagaaacaacaaagacgaagggggggacaagtgactccaacggagcagtacgtcgaagttctgactcgactgaaacccggtgagctcgggctcttgcgcaaccatgccgggcaagggctcgacgaatcggtagagggctttgaccttttcgcaggcctttggtggccgctgcgggcgcaaacccaacgggcgcctcgccgtgaggtggcctggcttgtcgccaaactctacgccctccggcccctcgagcattcaccccgcgagaccctcgctcgccagctcgggcgatcccggccgggcgagaaaacagcgcggcagcgtttcgagcaacgcttcgacaggatgctcacgctgccgcttgctgaaatcgaacccgccctacagtgggcaatcgacctcatagcttccaagcacctcgaactcgactgggtgcggctgacgaacgatctttccatctgggaacgcgaatccacccggctcaaatgggccgaggaatttttgaactgtccaagaggaggagagtcatgttgatccagattcacgccattcagaatcacagcccggccaacctgaaccgggatgacctgggcgcgcccaagacttgcttttttggcggagtcttgcgctcccgtatttccagccagtgccttaagcgcagcatccgcatgagtgaggagttcagacaattgctgggcggagttcgcacccgccagttggcgaaagagattgcggaaaaggtgacgggcaaagacgtcaggaagcgagcggagaacattctcaaagcctgcgggctggagcctaagaaagcaaaaaaacaggaaggagaagacgaacaggaaagtgctgagaggagcaagatgctggtttacaccacccaagaggcgattacacgcatggccgaactcctccagcagggcgacggaaaaacggacgaggccttggcagcggagttcggcaagctcatcagtgaatccgtcgccgtgccggacatggcgctgagcggcaggatgcttgaaacgggagtcctcaaagacacgacggttgaggcatcgcttcaagtcgcccatgccatttccacccatgaggcccggcccgaggtggactactatgtcgccgccgatgatgtccccggcgaggacgcgggcgcaggttacgtggatgaagccatgttcggttcggcatgtttctacaagtatttctccattcattgggaaacgctggtcaaaaacctgaagcccttcgggacgaatcacgaaaaactggcggcccataccgtcggcgccttcattcgcgccgcggccttggccaaccccacgggaaaacaaaatagttttgccgcgcacaaccctcctgacgggatgttggtggaagtcagaaacactcccatcagctacgccaacgccttcgccaaaccggcggctcctcagggcgaacgggacatcatctcgcagagcgtggcgcagcttgcccattatgtgaacgacatagatacgggatacggcaagccgacgaagcggttctggttctctccaaatctccgctatccgttgacggctaccaccacggagagcgaagacggaaaacagaaacagcgtgaggtcccgcttgccgacaaagatgttaagtctcttgacgaactgatagcggctgtactcaaggaaatcggttacgactggcaggaggccaagaaagtggtcctgaatccggaggtgccccatgagcgcaaagacgctgctacttcggcttgaaggtcctcttcaggcatggggcgatcagcaatccaagttcgtcattcggcgcacggccgaggcgccgaccaagtccggcgtcatcgggatgctttgcgcggcattgggcgtttcccggccagaggcccgcgaaggctggcttccaaggctggcccggctgcgcatgggcgtacgcgtcgatgcgccaggggtccgctggtgggattatcacacggtgggtgcggggatgccgatgcgtaccgccgaggggggaaccaagtccggagccatgctcacccgccgcgaatacctttgcgacgcctcgtttctcgtcgctcttcagggcgaaccggacctcattgaggaactggaggcggcaatcaaagcgcccaagtggacactctacctcggcagaaagtgctgccccccttgccgccctctgctggagcatccgggaggtgaattccccgacttgctttctgccctcgaatcggtcccctggcgtcggcggctgaaggacgatccccagccgcgacccgtcgattgcctgcttgattgggaacccaccaacgagcagcccgaggcgcccgatgatgcgctcgtctggtacgacgtgccgttgacattcgagccgccgtcgcaccaaccccgattcgtcatccgcaggcagttgcgcgtcggagcggacggcgacgtaacacttgcggtgcagccaccgcagagcgacacgccaccgcctccgcgcccaagagcggattacacgaacacagagtacaaaaaccgacgcaaggagcggctcgacgacgactatcacttgtgcgttttttgcaagtctcccgccagcaccgtgcagcacatcacgtaccgccgcgcgggcggcggcgaactccgggacgatttgcgctccctctgccgcctctgccacgacgccgtgaccatgatcgagtacgggctcggaatgggcttggaccgcatcaaccccgaagagccccgttggcgcgacaagatcatcgagaagcgggaagagattatcaggttccgctctctggagactcgccgcagacgccttgccgctgaggaggtggaatagccatgtacctctcctgcctcttgattgacgtcggcaccaaccccgaccgccccaggcccgggcggctctggctgcgaaacctccatcacgtccaccagcgcctttgcatggcgtttccatccaaagaccgaatatcccacgatccccacttcctcaagcctttcaaacccgcggactttgccaacaaccaggtccatgtaagacgtgacggcgactccggctttctcttccgcatcgacccgcaaccgggcgggcgggtcgtgatcctcgtccagtctaactctgccgtaaagcctgactggggctacgccttccacaacgcccgttttcttctgaatcctctagccgctccccctcaggtgcaggaattcgacccccgctttgagaagggtcagcggcttcgcttccgtatccgcgccaatctgagtaagaagataaaaaccagcacagagggcgttgatcttacgaggacgcgagaggggacagataagcggggccgcccgaaggcccaaggcaaacgcgtggcgctgacctgggacaaggaccagaaccgcgacgatgtgatacgaaaatggttcgccggcaagggcggccaaggtggattccaagtggaaactttccgggtcttgcagatcgggtggggcgcaggagaccgatccgacccgaggccgacgggcggccgcatgaaatttcgctcggcgttattggaggggacgcttacggttgaggacgcggacagcttcagagaaaccatcgtgggcggcgttgggcacggcaaagccttcggcttcggcctgctttccgtggcgccgctctcgctgtagcggcggtctccgaccgccggtacgtcgatcggagatcgacgctacaatcccttgtcgatcggggatccgtgcaacatttcttgagcggagatcgagccaatatgaaattcaaaccccgcttgcggcgactggactggctctatacgggcagcccaatctactatctcacgctgtgtacgcaggaccgcaaacgctcgttggcaaatcctgcgattcaccgggaattcacgagattctccgaacgggcgagcgattttcttgtttgggtcgggttcttcatgatcatgcctgatcacatccatcttttcgccggcttttgtcgtgagtccccacctttagggaaatggatcaaggcgctgcgcggggatttatccaaagtcctccgggaagatgagggcgagggcacacattgggagaaagactttttcgatcacgtcctgagatcgcaagaatcctatcgggagaaatatgaatatgtccggcagaatccggtccgggccggtttagtcaagcgcccggaagattggccgtaccagggtgagatccatcgcctggttttgtagcggcggtctccgaccgccgtaacgtcgatcggagatcgactacaaccccggtcgatcggagatcgacgctacaaccgccgtcgatcggagatcgacgctacagcacgggctggaggctctgtgagaattcaagatctccacgttctacccaagttcagtgacgggtggagttatctgtacgtcgagcattgccacgtcgatcaggaagagcgggccattgccgtccacgatcaagccgggaaggtgccggtcccctgtgccaatctggctctcctgatgttgggtccgggcgtctcgattactcacgccgccatctccgtgttggcggaccatgggtgcctggtggcttggtgcggggaggagggagtccgcttctacgccgtgggcatgggcgagacgcgcaacgcggccaacttcctgcatcaggcgaggctgtgggcggaccagggtttccatatgcaggtggtgcgccgcctctatcagttgcgattttcggagaagttcgaccctgccctgaccctccagcaaatccgcggcatggagggcgtgcgggtgcgcgatgcctacgccaaggccgcccaggaagccggcatcacgtggtcgggccgcagctataaacgcgatgagtggagcaaggcggaccctgccaaccgagccttgtccgccgctaactcctgcctatatggaatctgccatgctgccatcgtgtcagcaggtttttcgcccgcactcgggtttatccacaccggcaagatgctgtccttcgtctacgatctcgccgacctgtacaaggctgaaattaccgttccagtggcatttcgcgccgccgccgaggggacgggacagttggaacgccgggtgcgcatcacctgccgcgatcagttcgtatccacgcggcttctggagagaatcatcccggatgtccaaagggcgttgatgctggcaaaagcgacggcctgggacactaccttcgacctggatgccgccgcccccggcttcctctgggacaatctggaaggagaggtcgaaggcggccgcctgctagcccccgaaatcggtgaaacggagcccggcgatggtggtcctgattcttgagcgcgtccccccagggttgcgaggcgagctgactcgctggtttttggaacctcaggcgggagtgttcgtgggacgcgtctccgccatggtccgtgatcggctctgggaaaaagcctgcagccaggccaagggaggcgggtgcttgattatctattcaagcgacaatgaacagggctttcgagtccgaacctggggccaaacagctcgggtcatcgatgacttcgagggcctttttctcgttcgcatgccgcagaatcaataatttagtaagtgttgtccccacgcgcgtgggggtgaaccgccggggctgaaggtttcatgggctggaaagaagttgtccccacgcgcgtgggggtgaaccgatatgctgcatgtgccggggctggcgcttgatgttgtccccacgcgcgtgggggtgaaccggtatcggcgagtggcaaggcgaatccacttaggttgtccccacgcgcgtgggggtgaaccgacctccgagggcgcggggcgcgtgctggcgatgttgtccccacgcgcgtgggggtgaaccggctggggccgacgcgcgcttgtgagactgcgggttgtccccacgcgcgtgggggtgaaccgcgggagaactttgaaggcacggtcctcgatcacgttgtccccacgcgcgtgggggtgaaccggcgcaggttaaggctgaggccaaggccgatgcgttgtccccacgcgcgtgggggtgaaccgtaatggtggcttgcaccttctgctcgaccgatgttgtccccacgcgcgtgggggtgaaccgcagcgggccgtgttggaggagaaggtcgcggagttgtccccacgcgcgtgggggtgaaccgttcccagccgcaggcaggatcaccgtaccccagttgtccccacgcgcgtgggggtgaaccgcaaaacaatatcaagaccaagcacttggatgtgttgtccccacgcgcgtgggggtgaaccgcatcgggcagcacagcggccttataccccaaagttgtccccacgcgcgtgggggtgaaccggcagctcgcggcgattcgcattgccgctgaaagttgtccccacgcgcgtgggggtgaaccggggagtcgtgagtgtagttacaggcagggttcgttgtccccacgcgcgtgggggtgaaccgcttctgcatcttataaagaacgccagtttgaagttgtccccacgcgcgtgggggtgaaccggtacggttcccaggggaattatttcttggggtgttgtccccacgcgcgtgggggtgaaccgatgtagcttgatatgggtgtggtgtcgcagaagttgtccccacgcgcgtgggggtgaaccggcggcgcgcacattccaacctcgtccgtatccgttgtccccacgcgcgtgggggtgaaccggcggacacggcggatgtgacgaatatggagtcgttgtccccacgcgcgtgggggtgaaccggtctctcgaaaaggaaagccaactttcagcttgttgtccccacgcgcgtgggggtgaaccgctcttggcatagagcttagtgagtttgatgaagttgtccccacgcgcgtgggggtgaaccgcctttgccctccgagacgcaacagctccattcgttgtccccacgcgcgtgggggtgaaccggcgagcgcaggtctaagcgaccgcgacaaagagttgtccccacgcgcgtgggggtgaaccggtgatggacacttcctaaaatggcattaagtcgttgtccccacgcgcgtgggggtgaaccgcagcgggtagcgcagacttcgtgcatatcgaagtctgcggcttttgccgccgtgaatcttgaaaagccgcagacctgcaaaaagcgcaggtctgcgctacccactgcctggccatcctggagaattgaaagtccctccagtaaagcggcgaagcgcaggatttccggctgcttcaatcgcttgcgacgctcaccggtcagtagcgcgttggtaatttcgagcccccatacggctggaacaacgagcgtctgcccttcagtgccaccaggaccccgtccgcgtattcgctcgcttcatccggggagcaccaggcaagcgccaccgacgcatgcaccacaacgccgctcaaaatcgccgtccctcaattatcatttcgcggacgctcatggtgtggggctttacgcgcttgcgcaacgcgcgcatgccctcgacaatctcctcgtgcgtcagctttcgatccgagtctcgaaccggcaccagcattgccgccggaacgccgtgtcttgtaatcgtgatcctttcgcaacccatcttgtccagctaaagctccgcatcagctatagtctccctctggccgtgcggcccgccccttgcggcgcaaccaaaccgaagctcaaaacgcgacatcgtcctcgtagcgcgaccggacactgaaggtaaaggttcgccacccgtctcccctgcaaaaccgggtcgcggagtactattgctttgcacagcgggggacgaccgaggcgctacggaagaggttggttcgcgaaactgagcaagagacccctcacccgtcccgctccggctggtggaagcgccggagcgggacacgctcagccccaagggagagggctatggattcagttctacgcgcggtgtccagtcaaagatgtgggacacgctcagccccaagggagagggctatggattcagttctacgc

SEQ ID NO: 1037 - DNA, 106286 bp, Artificial Sequence
  Synthetic Oligonucleotide
  misc_feature (1)..(96240): n is a, c, g, or t
nnnnnnnnnnnnnnnnnnnnnnnnnnnnnnnnnnnnnnnnnnnnnnnnnnnnnnnnnnnnnnnnnnnnnnnnnnnnnnnnnnnnnnnnnnnnnnnnnnnnnnnnnnnnnnnnnnnnnnnnnnnnnnnnnnnnnnnnnnnnnnnnnnnnnnnnnnnnnnnnnnnnnnnnnnnnnnnnnnnnnnnnnnnnnnnnnnnnnnnnnnnnnnnnnnnnnnnnnnnnnnnnnnnnnnnnnnnnnnnnnnnnnnnnnnnnnnnnnnnnnnnnnnnnnnnnnnnnnnnnnnnnnnnnnnnnnnnnnnnnnnnnnnnnnnnnnnnnnnnnnnnnnnnnnnnnnnnnnnnnnnnnnnnnnnnnnnnnnnnnnnnnnnnnnnnnnnnnnnnnnnnnnnnnnnnnnnnnnnnnnnnnnnnnnnnnnnnnnnnnnnnnnnnnnnnnnnnnnnnnnnnnnnnnnnnnnnnnnnnnnnnnnnnnnnnnnnnnnnnnnnnnnnnnnnnnnnnnnnnnnnnnnnnnnnnnnnnnnnnnnnnnnnnnnnnnnnnnnnnnnnnnnnnnnnnnnnnnnnnnnnnnnnnnnnnnnnnnnnnnnnnnnnnnnnnnnnnnnnnnnnnnnnnnnnnnnnnnnnnnnnnnnnnnnnnnnnnnnnnnnnnnnnnnnnnnnnnnnnnnnnnnnnnnnnnnnnnnnnnnnnnnnnnnnnnnnnnnnnnnnnnnnnnnnnnnnnnnnnnnnnnnnnnnnnnnnnnnnnnnnnnnnnnnnnnnnnnnnnnnnnnnnnnnnnnnnnnnnnnnnnnnnnnnnnnnnnnnnnnnnnnnnnnnnnnnnnnnnnnnnnnnnnnnnnnnnnnnnnnnnnnnnnnnnnnnnnnnnnnnnnnnnnnnnnnnnnnnnnnnnnnnnnnnnnnnnnnnnnnnnnnnnnnnnnnnnnnnnnnnnnnnnnnnnnnnnnnnnnnnnnnnnnnnnnnnnnnnnnnnnnnnnnnnnnnnnnnnnnnnnnnnnnnnnnnnnnnnnnnnnnnnnnnnnnnnnnnnnnnnnnnnnnnnnnnnnnnnnnnnnnnnnnnnnnnnnnnnnnnnnnnnnnnnnnnnnnnnnnnnnnnnnnnnnnnnnnnnnnnnnnnnnnnnnnnnnnnnnnnnnnnnnnnnnnnnnnnnnnnnnnnnnnnnnnnnnnnnnnnnnnnnnnnnnnnnnnnnnnnnnnnnnnnnnnnnnnnnnnnnnnnnnnnnnnnnnnnnnnnnnnnnnnnnnnnnnnnnnnnnnnnnnnnnnnnnnnnnnnnnnnnnnnnnnnnnnnnnnnnnnnnnnnnnnnnnnnnnnnnnnnnnnnnnnnnnnnnnnnnnnnnnnnnnnnnnnnnnnnnnnnnnnnnnnnnnnnnnnnnnnnnnnnnnnnnnnnnnnnnnnnnnnnnnnnnnnnnnnnnnnnnnnnnnnnnnnnnnnnnnnnnnnnnnnnnnnnnnnnnnnnnnnnnnnnnnnnnnnnnnnnnnnnnnnnnnnnnnnnnnnnnnnnnnnnnnnnnnnnnnnnnnnnnnnnnnnnnnnnnnnnnnnnnnnnnnnnnnnnnnnnnnnnnnnnnnnnnnnnnnnnnnnnnnnnnnnnnnnnnnnnnnnnnnnnnnnnnnnnnnnnnnnnnnnnnnnnnnnnnnnnnnnnnnnnnnnnnnnnnnnnnnnnnnnnnnnnnnnnnnnnnnnnnnnnnnnnnnnnnnnnnnnnnnnnnnnnnnnnnnnnnnnnnnnnnnnnnnnnnnnnnnnnnnnnnnnnnnnnnnnnnnnnnnnnnnnnnnnnnnnnnnnnnnnnnnnnnnnnnnnnnnnnnnnnnnnnnnnnnnnnnnnnnnnnnnnnnnnnnnnnnnnnnnnnnnnnnnnnnnnnnnnnnnnnnnnnnnnnnnnnnnnnnnnnnnnnnnnnnnnnnnnnnnnnnnnnnnnnnnnnnnnnnnnnnnnnnnnnnnnnnnnnnnnnnnnnnnnnnnnnnnnnnnnnnnnnnnnnnnnnnnnnnnnnnnnnnnnnnnnnnnnnnnnnnnnnnnnnnnnnnnnnnnnnnnnnnnnnnnnnnnnnnnnnnnnnnnnnnnnnnnnnnnnnnnnnnnnnnnnnnnnnnnnnnnnnnnnnnnnnnnnnnnnnnnnnnnnnnnnnnnnnnnnnnnnnnnnnnnnnnnnnnnnnnnnnnnnnnnnnnnnnnnnnnnnnnnnnnnnnnnnnnnnnnnnnnnnnnnnnnnnnnnnnnnnnnnnnnnnnnnnnnnnnnnnnnnnnnnnnnnnnnnnnnnnnnnnnnnnnnnnnnnnnnnnnnnnnnnnnnnnnnnnnnnnnnnnnnnnnnnnnnnnnnnnnnnnnnnnnnnnnnnnnnnnnnnnnnnnnnnnnnnnnnnnnnnnnnnnnnnnnnnnnnnnnnnnnnnnnnnnnnnnnnnnnnnnnnnnnnnnnnnnnnnnnnnnnnnnnnnnnnnnnnnnnnnnnnnnnnnnnnnnnnnnnnnnnnnnnnnnnnnnnnnnnnnnnnnnnnnnnnnnnnnnnnnnnnnnnnnnnnnnnnnnnnnnnnnnnnnnnnnnnnnnnnnnnnnnnnnnnnnnnnnnnnnnnnnnnnnnnnnnnnnnnnnnnnnnnnnnnnnnnnnnnnnnnnnnnnnnnnnnnnnnnnnnnnnnnnnnnnnnnnnnnnnnnnnnnnnnnnnnnnnnnnnnnnnnnnnnnnnnnnnnnnnnnnnnnnnnnnnnnnnnnnnnnnnnnnnnnnnnnnnnnnnnnnnnnnnnnnnnnnnnnnnnnnnnnnnnnnnnnnnnnnnnnnnnnnnnnnnnnnnnnnnnnnnnnnnnnnnnnnnnnnnnnnnnnnnnnnnnnnnnnnnnnnnnnnnnnnnnnnnnnnnnnnnnnnnnnnnnnnnnnnnnnnnnnnnnnnnnnnnnnnnnnnnnnnnnnnnnnnnnnnnnnnnnnnnnnnnnnnnnnnnnnnnnnnnnnnnnnnnnnnnnnnnnnnnnnnnnnnnnnnnnnnnnnnnnnnnnnnnnnnnnnnnnnnnnnnnnnnnnnnnnnnnnnnnnnnnnnnnnnnnnnnnnnnnnnnnnnnnnnnnnnnnnnnnnnnnnnnnnnnnnnnnnnnnnnnnnnnnnnnnnnnnnnnnnnnnnnnnnnnnnnnnnnnnnnnnnnnnnnnnnnnnnnnnnnnnnnnnnnnnnnnnnnnnnnnnnnnnnnnnnnnnnnnnnnnnnnnnnnnnnnnnnnnnnnnnnnnnnnnnnnnnnnnnnnnnnnnnnnnnnnnnnnnnnnnnnnnnnnnnnnnnnnnnnnnnnnnnnnnnnnnnnnnnnnnnnnnnnnnnnnnnnnnnnnnnnnnnnnnnnnnnnnnnnnnnnnnnnnnnnnnnnnnnnnnnnnnnnnnnnnnnnnnnnnnnnnnnnnnnnnnnnnnnnnnnnnnnnnnnnnnnnnnnnnnnnnnnnnnnnnnnnnnnnnnnnnnnnnnnnnnnnnnnnnnnnnnnnnnnnnnnnnnnnnnnnnnnnnnnnnnnnnnnnnnnnnnnnnnnnnnnnnnnnnnnnnnnnnnnnnnnnnnnnnnnnnnnnnnnnnnnnnnnnnnnnnnnnnnnnnnnnnnnnnnnnnnnnnnnnnnnnnnnnnnnnnnnnnnnnnnnnnnnnnnnnnnnnnnnnnnnnnnnnnnnnnnnnnnnnnnnnnnnnnnnnnnnnnnnnnnnnnnnnnnnnnnnnnnnnnnnnnnnnnnnnnnnnnnnnnnnnnnnnnnnnnnnnnnnnnnnnnnnnnnnnnnnnnnnnnnnnnnnnnnnnnnnnnnnnnnnnnnnnnnnnnnnnnnnnnnnnnnnnnnnnnnnnnnnnnnnnnnnnnnnnnnnnnnnnnnnnnnnnnnnnnnnnnnnnnnnnnnnnnnnnnnnnnnnnnnnnnnnnnnnnnnnnnnnnnnnnnnnnnnnnnnnnnnnnnnnnnnnnnnnnnnnnnnnnnnnnnnnnnnnnnnnnnnnnnnnnnnnnnnnnnnnnnnnnnnnnnnnnnnnnnnnnnnnnnnnnnnnnnnnnnnnnnnnnnnnnnnnnnnnnnnnnnnnnnnnnnnnnnnnnnnnnnnnnnnnnnnnnnnnnnnnnnnnnnnnnnnnnnnnnnnnnnnnnnnnnnnnnnnnnnnnnnnnnnnnnnnnnnnnnnnnnnnnnnnnnnnnnnnnnnnnnnnnnnnnnnnnnnnnnnnnnnnnnnnnnnnnnnnnnnnnnnnnnnnnnnnnnnnnnnnnnnnnnnnnnnnnnnnnnnnnnnnnnnnnnnnnnnnnnnnnnnnnnnnnnnnnnnnnnnnnnnnnnnnnnnnnnnnnnnnnnnnnnnnnnnnnnnnnnnnnnnnnnnnnnnnnnnnnnnnnnnnnnnnnnnnnnnnnnnnnnnnnnnnnnnnnnnnnnnnnnnnnnnnnnnnnnnnnnnnnnnnnnnnnnnnnnnnnnnnnnnnnnnnnnnnnnnnnnnnnnnnnnnnnnnnnnnnnnnnnnnnnnnnnnnnnnnnnnnnnnnnnnnnnnnnnnnnnnnnnnnnnnnnnnnnnnnnnnnnnnnnnnnnnnnnnnnnnnnnnnnnnnnnnnnnnnnnnnnnnnnnnnnnnnnnnnnnnnnnnnnnnnnnnnnnnnnnnnnnnnnnnnnnnnnnnnnnnnnnnnnnnnnnnnnnnnnnnnnnnnnnnnnnnnnnnnnnnnnnnnnnnnnnnnnnnnnnnnnnnnnnnnnnnnnnnnnnnnnnnnnnnnnnnnnnnnnnnnnnnnnnnnnnnnnnnnnnnnnnnnnnnnnnnnnnnnnnnnnnnnnnnnnnnnnnnnnnnnnnnnnnnnnnnnnnnnnnnnnnnnnnnnnnnnnnnnnnnnnnnnnnnnnnnnnnnnnnnnnnnnnnnnnnnnnnnnnnnnnnnnnnnnnnnnnnnnnnnnnnnnnnnnnnnnnnnnnnnnnnnnnnnnnnnnnnnnnnnnnnnnnnnnnnnnnnnnnnnnnnnnnnnnnnnnnnnnnnnnnnnnnnnnnnnnnnnnnnnnnnnnnnnnnnnnnnnnnnnnnnnnnnnnnnnnnnnnnnnnnnnnnnnnnnnnnnnnnnnnnnnnnnnnnnnnnnnnnnnnnnnnnnnnnnnnnnnnnnnnnnnnnnnnnnnnnnnnnnnnnnnnnnnnnnnnnnnnnnnnnnnnnnnnnnnnnnnnnnnnnnnnnnnnnnnnnnnnnnnnnnnnnnnnnnnnnnnnnnnnnnnnnnnnnnnnnnnnnnnnnnnnnnnnnnnnnnnnnnnnnnnnnnnnnnnnnnnnnnnnnnnnnnnnnnnnnnnnnnnnnnnnnnnnnnnnnnnnnnnnnnnnnnnnnnnnnnnnnnnnnnnnnnnnnnnnnnnnnnnnnnnnnnnnnnnnnnnnnnnnnnnnnnnnnnnnnnnnnnnnnnnnnnnnnnnnnnnnnnnnnnnnnnnnnnnnnnnnnnnnnnnnnnnnnnnnnnnnnnnnnnnnnnnnnnnnnnnnnnnnnnnnnnnnnnnnnnnnnnnnnnnnnnnnnnnnnnnnnnnnnnnnnnnnnnnnnnnnnnnnnnnnnnnnnnnnnnnnnnnnnnnnnnnnnnnnnnnnnnnnnnnnnnnnnnnnnnnnnnnnnnnnnnnnnnnnnnnnnnnnnnnnnnnnnnnnnnnnnnnnnnnnnnnnnnnnnnnnnnnnnnnnnnnnnnnnnnnnnnnnnnnnnnnnnnnnnnnnnnnnnnnnnnnnnnnnnnnnnnnnnnnnnnnnnnnnnnnnnnnnnnnnnnnnnnnnnnnnnnnnnnnnnnnnnnnnnnnnnnnnnnnnnnnnnnnnnnnnnnnnnnnnnnnnnnnnnnnnnnnnnnnnnnnnnnnnnnnnnnnnnnnnnnnnnnnnnnnnnnnnnnnnnnnnnnnnnnnnnnnnnnnnnnnnnnnnnnnnnnnnnnnnnnnnnnnnnnnnnnnnnnnnnnnnnnnnnnnnnnnnnnnnnnnnnnnnnnnnnnnnnnnnnnnnnnnnnnnnnnnnnnnnnnnnnnnnnnnnnnnnnnnnnnnnnnnnnnnnnnnnnnnnnnnnnnnnnnnnnnnnnnnnnnnnnnnnnnnnnnnnnnnnnnnnnnnnnnnnnnnnnnnnnnnnnnnnnnnnnnnnnnnnnnnnnnnnnnnnnnnnnnnnnnnnnnnnnnnnnnnnnnnnnnnnnnnnnnnnnnnnnnnnnnnnnnnnnnnnnnnnnnnnnnnnnnnnnnnnnnnnnnnnnnnnnnnnnnnnnnnnnnnnnnnnnnnnnnnnnnnnnnnnnnnnnnnnnnnnnnnnnnnnnnnnnnnnnnnnnnnnnnnnnnnnnnnnnnnnnnnnnnnnnnnnnnnnnnnnnnnnnnnnnnnnnnnnnnnnnnnnnnnnnnnnnnnnnnnnnnnnnnnnnnnnnnnnnnnnnnnnnnnnnnnnnnnnnnnnnnnnnnnnnnnnnnnnnnnnnnnnnnnnnnnnnnnnnnnnnnnnnnnnnnnnnnnnnnnnnnnnnnnnnnnnnnnnnnnnnnnnnnnnnnnnnnnnnnnnnnnnnnnnnnnnnnnnnnnnnnnnnnnnnnnnnnnnnnnnnnnnnnnnnnnnnnnnnnnnnnnnnnnnnnnnnnnnnnnnnnnnnnnnnnnnnnnnnnnnnnnnnnnnnnnnnnnnnnnnnnnnnnnnnnnnnnnnnnnnnnnnnnnnnnnnnnnnnnnnnnnnnnnnnnnnnnnnnnnnnnnnnnnnnnnnnnnnnnnnnnnnnnnnnnnnnnnnnnnnnnnnnnnnnnnnnnnnnnnnnnnnnnnnnnnnnnnnnnnnnnnnnnnnnnnnnnnnnnnnnnnnnnnnnnnnnnnnnnnnnnnnnnnnnnnnnnnnnnnnnnnnnnnnnnnnnnnnnnnnnnnnnnnnnnnnnnnnnnnnnnnnnnnnnnnnnnnnnnnnnnnnnnnnnnnnnnnnnnnnnnnnnnnnnnnnnnnnnnnnnnnnnnnnnnnnnnnnnnnnnnnnnnnnnnnnnnnnnnnnnnnnnnnnnnnnnnnnnnnnnnnnnnnnnnnnnnnnnnnnnnnnnnnnnnnnnnnnnnnnnnnnnnnnnnnnnnnnnnnnnnnnnnnnnnnnnnnnnnnnnnnnnnnnnnnnnnnnnnnnnnnnnnnnnnnnnnnnnnnnnnnnnnnnnnnnnnnnnnnnnnnnnnnnnnnnnnnnnnnnnnnnnnnnnnnnnnnnnnnnnnnnnnnnnnnnnnnnnnnnnnnnnnnnnnnnnnnnnnnnnnnnnnnnnnnnnnnnnnnnnnnnnnnnnnnnnnnnnnnnnnnnnnnnnnnnnnnnnnnnnnnnnnnnnnnnnnnnnnnnnnnnnnnnnnnnnnnnnnnnnnnnnnnnnnnnnnnnnnnnnnnnnnnnnnnnnnnnnnnnnnnnnnnnnnnnnnnnnnnnnnnnnnnnnnnnnnnnnnnnnnnnnnnnnnnnnnnnnnnnnnnnnnnnnnnnnnnnnnnnnnnnnnnnnnnnnnnnnnnnnnnnnnnnnnnnnnnnnnnnnnnnnnnnnnnnnnnnnnnnnnnnnnnnnnnnnnnnnnnnnnnnnnnnnnnnnnnnnnnnnnnnnnnnnnnnnnnnnnnnnnnnnnnnnnnnnnnnnnnnnnnnnnnnnnnnnnnnnnnnnnnnnnnnnnnnnnnnnnnnnnnnnnnnnnnnnnnnnnnnnnnnnnnnnnnnnnnnnnnnnnnnnnnnnnnnnnnnnnnnnnnnnnnnnnnnnnnnnnnnnnnnnnnnnnnnnnnnnnnnnnnnnnnnnnnnnnnnnnnnnnnnnnnnnnnnnnnnnnnnnnnnnnnnnnnnnnnnnnnnnnnnnnnnnnnnnnnnnnnnnnnnnnnnnnnnnnnnnnnnnnnnnnnnnnnnnnnnnnnnnnnnnnnnnnnnnnnnnnnnnnnnnnnnnnnnnnnnnnnnnnnnnnnnnnnnnnnnnnnnnnnnnnnnnnnnnnnnnnnnnnnnnnnnnnnnnnnnnnnnnnnnnnnnnnnnnnnnnnnnnnnnnnnnnnnnnnnnnnnnnnnnnnnnnnnnnnnnnnnnnnnnnnnnnnnnnnnnnnnnnnnnnnnnnnnnnnnnnnnnnnnnnnnnnnnnnnnnnnnnnnnnnnnnnnnnnnnnnnnnnnnnnnnnnnnnnnnnnnnnnnnnnnnnnnnnnnnnnnnnnnnnnnnnnnnnnnnnnnnnnnnnnnnnnnnnnnnnnnnnnnnnnnnnnnnnnnnnnnnnnnnnnnnnnnnnnnnnnnnnnnnnnnnnnnnnnnnnnnnnnnnnnnnnnnnnnnnnnnnnnnnnnnnnnnnnnnnnnnnnnnnnnnnnnnnnnnnnnnnnnnnnnnnnnnnnnnnnnnnnnnnnnnnnnnnnnnnnnnnnnnnnnnnnnnnnnnnnnnnnnnnnnnnnnnnnnnnnnnnnnnnnnnnnnnnnnnnnnnnnnnnnnnnnnnnnnnnnnnnnnnnnnnnnnnnnnnnnnnnnnnnnnnnnnnnnnnnnnnnnnnnnnnnnnnnnnnnnnnnnnnnnnnnnnnnnnnnnnnnnnnnnnnnnnnnnnnnnnnnnnnnnnnnnnnnnnnnnnnnnnnnnnnnnnnnnnnnnnnnnnnnnnnnnnnnnnnnnnnnnnnnnnnnnnnnnnnnnnnnnnnnnnnnnnnnnnnnnnnnnnnnnnnnnnnnnnnnnnnnnnnnnnnnnnnnnnnnnnnnnnnnnnnnnnnnnnnnnnnnnnnnnnnnnnnnnnnnnnnnnnnnnnnnnnnnnnnnnnnnnnnnnnnnnnnnnnnnnnnnnnnnnnnnnnnnnnnnnnnnnnnnnnnnnnnnnnnnnnnnnnnnnnnnnnnnnnnnnnnnnnnnnnnnnnnnnnnnnnnnnnnnnnnnnnnnnnnnnnnnnnnnnnnnnnnnnnnnnnnnnnnnnnnnnnnnnnnnnnnnnnnnnnnnnnnnnnnnnnnnnnnnnnnnnnnnnnnnnnnnnnnnnnnnnnnnnnnnnnnnnnnnnnnnnnnnnnnnnnnnnnnnnnnnnnnnnnnnnnnnnnnnnnnnnnnnnnnnnnnnnnnnnnnnnnnnnnnnnnnnnnnnnnnnnnnnnnnnnnnnnnnnnnnnnnnnnnnnnnnnnnnnnnnnnnnnnnnnnnnnnnnnnnnnnnnnnnnnnnnnnnnnnnnnnnnnnnnnnnnnnnnnnnnnnnnnnnnnnnnnnnnnnnnnnnnnnnnnnnnnnnnnnnnnnnnnnnnnnnnnnnnnnnnnnnnnnnnnnnnnnnnnnnnnnnnnnnnnnnnnnnnnnnnnnnnnnnnnnnnnnnnnnnnnnnnnnnnnnnnnnnnnnnnnnnnnnnnnnnnnnnnnnnnnnnnnnnnnnnnnnnnnnnnnnnnnnnnnnnnnnnnnnnnnnnnnnnnnnnnnnnnnnnnnnnnnnnnnnnnnnnnnnnnnnnnnnnnnnnnnnnnnnnnnnnnnnnnnnnnnnnnnnnnnnnnnnnnnnnnnnnnnnnnnnnnnnnnnnnnnnnnnnnnnnnnnnnnnnnnnnnnnnnnnnnnnnnnnnnnnnnnnnnnnnnnnnnnnnnnnnnnnnnnnnnnnnnnnnnnnnnnnnnnnnnnnnnnnnnnnnnnnnnnnnnnnnnnnnnnnnnnnnnnnnnnnnnnnnnnnnnnnnnnnnnnnnnnnnnnnnnnnnnnnnnnnnnnnnnnnnnnnnnnnnnnnnnnnnnnnnnnnnnnnnnnnnnnnnnnnnnnnnnnnnnnnnnnnnnnnnnnnnnnnnnnnnnnnnnnnnnnnnnnnnnnnnnnnnnnnnnnnnnnnnnnnnnnnnnnnnnnnnnnnnnnnnnnnnnnnnnnnnnnnnnnnnnnnnnnnnnnnnnnnnnnnnnnnnnnnnnnnnnnnnnnnnnnnnnnnnnnnnnnnnnnnnnnnnnnnnnnnnnnnnnnnnnnnnnnnnnnnnnnnnnnnnnnnnnnnnnnnnnnnnnnnnnnnnnnnnnnnnnnnnnnnnnnnnnnnnnnnnnnnnnnnnnnnnnnnnnnnnnnnnnnnnnnnnnnnnnnnnnnnnnnnnnnnnnnnnnnnnnnnnnnnnnnnnnnnnnnnnnnnnnnnnnnnnnnnnnnnnnnnnnnnnnnnnnnnnnnnnnnnnnnnnnnnnnnnnnnnnnnnnnnnnnnnnnnnnnnnnnnnnnnnnnnnnnnnnnnnnnnnnnnnnnnnnnnnnnnnnnnnnnnnnnnnnnnnnnnnnnnnnnnnnnnnnnnnnnnnnnnnnnnnnnnnnnnnnnnnnnnnnnnnnnnnnnnnnnnnnnnnnnnnnnnnnnnnnnnnnnnnnnnnnnnnnnnnnnnnnnnnnnnnnnnnnnnnnnnnnnnnnnnnnnnnnnnnnnnnnnnnnnnnnnnnnnnnnnnnnnnnnnnnnnnnnnnnnnnnnnnnnnnnnnnnnnnnnnnnnnnnnnnnnnnnnnnnnnnnnnnnnnnnnnnnnnnnnnnnnnnnnnnnnnnnnnnnnnnnnnnnnnnnnnnnnnnnnnnnnnnnnnnnnnnnnnnnnnnnnnnnnnnnnnnnnnnnnnnnnnnnnnnnnnnnnnnnnnnnnnnnnnnnnnnnnnnnnnnnnnnnnnnnnnnnnnnnnnnnnnnnnnnnnnnnnnnnnnnnnnnnnnnnnnnnnnnnnnnnnnnnnnnnnnnnnnnnnnnnnnnnnnnnnnnnnnnnnnnnnnnnnnnnnnnnnnnnnnnnnnnnnnnnnnnnnnnnnnnnnnnnnnnnnnnnnnnnnnnnnnnnnnnnnnnnnnnnnnnnnnnnnnnnnnnnnnnnnnnnnnnnnnnnnnnnnnnnnnnnnnnnnnnnnnnnnnnnnnnnnnnnnnnnnnnnnnnnnnnnnnnnnnnnnnnnnnnnnnnnnnnnnnnnnnnnnnnnnnnnnnnnnnnnnnnnnnnnnnnnnnnnnnnnnnnnnnnnnnnnnnnnnnnnnnnnnnnnnnnnnnnnnnnnnnnnnnnnnnnnnnnnnnnnnnnnnnnnnnnnnnnnnnnnnnnnnnnnnnnnnnnnnnnnnnnnnnnnnnnnnnnnnnnnnnnnnnnnnnnnnnnnnnnnnnnnnnnnnnnnnnnnnnnnnnnnnnnnnnnnnnnnnnnnnnnnnnnnnnnnnnnnnnnnnnnnnnnnnnnnnnnnnnnnnnnnnnnnnnnnnnnnnnnnnnnnnnnnnnnnnnnnnnnnnnnnnnnnnnnnnnnnnnnnnnnnnnnnnnnnnnnnnnnnnnnnnnnnnnnnnnnnnnnnnnnnnnnnnnnnnnnnnnnnnnnnnnnnnnnnnnnnnnnnnnnnnnnnnnnnnnnnnnnnnnnnnnnnnnnnnnnnnnnnnnnnnnnnnnnnnnnnnnnnnnnnnnnnnnnnnnnnnnnnnnnnnnnnnnnnnnnnnnnnnnnnnnnnnnnnnnnnnnnnnnnnnnnnnnnnnnnnnnnnnnnnnnnnnnnnnnnnnnnnnnnnnnnnnnnnnnnnnnnnnnnnnnnnnnnnnnnnnnnnnnnnnnnnnnnnnnnnnnnnnnnnnnnnnnnnnnnnnnnnnnnnnnnnnnnnnnnnnnnnnnnnnnnnnnnnnnnnnnnnnnnnnnnnnnnnnnnnnnnnnnnnnnnnnnnnnnnnnnnnnnnnnnnnnnnnnnnnnnnnnnnnnnnnnnnnnnnnnnnnnnnnnnnnnnnnnnnnnnnnnnnnnnnnnnnnnnnnnnnnnnnnnnnnnnnnnnnnnnnnnnnnnnnnnnnnnnnnnnnnnnnnnnnnnnnnnnnnnnnnnnnnnnnnnnnnnnnnnnnnnnnnnnnnnnnnnnnnnnnnnnnnnnnnnnnnnnnnnnnnnnnnnnnnnnnnnnnnnnnnnnnnnnnnnnnnnnnnnnnnnnnnnnnnnnnnnnnnnnnnnnnnnnnnnnnnnnnnnnnnnnnnnnnnnnnnnnnnnnnnnnnnnnnnnnnnnnnnnnnnnnnnnnnnnnnnnnnnnnnnnnnnnnnnnnnnnnnnnnnnnnnnnnnnnnnnnnnnnnnnnnnnnnnnnnnnnnnnnnnnnnnnnnnnnnnnnnnnnnnnnnnnnnnnnnnnnnnnnnnnnnnnnnnnnnnnnnnnnnnnnnnnnnnnnnnnnnnnnnnnnnnnnnnnnnnnnnnnnnnnnnnnnnnnnnnnnnnnnnnnnnnnnnnnnnnnnnnnnnnnnnnnnnnnnnnnnnnnnnnnnnnnnnnnnnnnnnnnnnnnnnnnnnnnnnnnnnnnnnnnnnnnnnnnnnnnnnnnnnnnnnnnnnnnnnnnnnnnnnnnnnnnnnnnnnnnnnnnnnnnnnnnnnnnnnnnnnnnnnnnnnnnnnnnnnnnnnnnnnnnnnnnnnnnnnnnnnnnnnnnnnnnnnnnnnnnnnnnnnnnnnnnnnnnnnnnnnnnnnnnnnnnnnnnnnnnnnnnnnnnnnnnnnnnnnnnnnnnnnnnnnnnnnnnnnnnnnnnnnnnnnnnnnnnnnnnnnnnnnnnnnnnnnnnnnnnnnnnnnnnnnnnnnnnnnnnnnnnnnnnnnnnnnnnnnnnnnnnnnnnnnnnnnnnnnnnnnnnnnnnnnnnnnnnnnnnnnnnnnnnnnnnnnnnnnnnnnnnnnnnnnnnnnnnnnnnnnnnnnnnnnnnnnnnnnnnnnnnnnnnnnnnnnnnnnnnnnnnnnnnnnnnnnnnnnnnnnnnnnnnnnnnnnnnnnnnnnnnnnnnnnnnnnnnnnnnnnnnnnnnnnnnnnnnnnnnnnnnnnnnnnnnnnnnnnnnnnnnnnnnnnnnnnnnnnnnnnnnnnnnnnnnnnnnnnnnnnnnnnnnnnnnnnnnnnnnnnnnnnnnnnnnnnnnnnnnnnnnnnnnnnnnnnnnnnnnnnnnnnnnnnnnnnnnnnnnnnnnnnnnnnnnnnnnnnnnnnnnnnnnnnnnnnnnnnnnnnnnnnnnnnnnnnnnnnnnnnnnnnnnnnnnnnnnnnnnnnnnnnnnnnnnnnnnnnnnnnnnnnnnnnnnnnnnnnnnnnnnnnnnnnnnnnnnnnnnnnnnnnnnnnnnnnnnnnnnnnnnnnnnnnnnnnnnnnnnnnnnnnnnnnnnnnnnnnnnnnnnnnnnnnnnnnnnnnnnnnnnnnnnnnnnnnnnnnnnnnnnnnnnnnnnnnnnnnnnnnnnnnnnnnnnnnnnnnnnnnnnnnnnnnnnnnnnnnnnnnnnnnnnnnnnnnnnnnnnnnnnnnnnnnnnnnnnnnnnnnnnnnnnnnnnnnnnnnnnnnnnnnnnnnnnnnnnnnnnnnnnnnnnnnnnnnnnnnnnnnnnnnnnnnnnnnnnnnnnnnnnnnnnnnnnnnnnnnnnnnnnnnnnnnnnnnnnnnnnnnnnnnnnnnnnnnnnnnnnnnnnnnnnnnnnnnnnnnnnnnnnnnnnnnnnnnnnnnnnnnnnnnnnnnnnnnnnnnnnnnnnnnnnnnnnnnnnnnnnnnnnnnnnnnnnnnnnnnnnnnnnnnnnnnnnnnnnnnnnnnnnnnnnnnnnnnnnnnnnnnnnnnnnnnnnnnnnnnnnnnnnnnnnnnnnnnnnnnnnnnnnnnnnnnnnnnnnnnnnnnnnnnnnnnnnnnnnnnnnnnnnnnnnnnnnnnnnnnnnnnnnnnnnnnnnnnnnnnnnnnnnnnnnnnnnnnnnnnnnnnnnnnnnnnnnnnnnnnnnnnnnnnnnnnnnnnnnnnnnnnnnnnnnnnnnnnnnnnnnnnnnnnnnnnnnnnnnnnnnnnnnnnnnnnnnnnnnnnnnnnnnnnnnnnnnnnnnnnnnnnnnnnnnnnnnnnnnnnnnnnnnnnnnnnnnnnnnnnnnnnnnnnnnnnnnnnnnnnnnnnnnnnnnnnnnnnnnnnnnnnnnnnnnnnnnnnnnnnnnnnnnnnnnnnnnnnnnnnnnnnnnnnnnnnnnnnnnnnnnnnnnnnnnnnnnnnnnnnnnnnnnnnnnnnnnnnnnnnnnnnnnnnnnnnnnnnnnnnnnnnnnnnnnnnnnnnnnnnnnnnnnnnnnnnnnnnnnnnnnnnnnnnnnnnnnnnnnnnnnnnnnnnnnnnnnnnnnnnnnnnnnnnnnnnnnnnnnnnnnnnnnnnnnnnnnnnnnnnnnnnnnnnnnnnnnnnnnnnnnnnnnnnnnnnnnnnnnnnnnnnnnnnnnnnnnnnnnnnnnnnnnnnnnnnnnnnnnnnnnnnnnnnnnnnnnnnnnnnnnnnnnnnnnnnnnnnnnnnnnnnnnnnnnnnnnnnnnnnnnnnnnnnnnnnnnnnnnnnnnnnnnnnnnnnnnnnnnnnnnnnnnnnnnnnnnnnnnnnnnnnnnnnnnnnnnnnnnnnnnnnnnnnnnnnnnnnnnnnnnnnnnnnnnnnnnnnnnnnnnnnnnnnnnnnnnnnnnnnnnnnnnnnnnnnnnnnnnnnnnnnnnnnnnnnnnnnnnnnnnnnnnnnnnnnnnnnnnnnnnnnnnnnnnnnnnnnnnnnnnnnnnnnnnnnnnnnnnnnnnnnnnnnnnnnnnnnnnnnnnnnnnnnnnnnnnnnnnnnnnnnnnnnnnnnnnnnnnnnnnnnnnnnnnnnnnnnnnnnnnnnnnnnnnnnnnnnnnnnnnnnnnnnnnnnnnnnnnnnnnnnnnnnnnnnnnnnnnnnnnnnnnnnnnnnnnnnnnnnnnnnnnnnnnnnnnnnnnnnnnnnnnnnnnnnnnnnnnnnnnnnnnnnnnnnnnnnnnnnnnnnnnnnnnnnnnnnnnnnnnnnnnnnnnnnnnnnnnnnnnnnnnnnnnnnnnnnnnnnnnnnnnnnnnnnnnnnnnnnnnnnnnnnnnnnnnnnnnnnnnnnnnnnnnnnnnnnnnnnnnnnnnnnnnnnnnnnnnnnnnnnnnnnnnnnnnnnnnnnnnnnnnnnnnnnnnnnnnnnnnnnnnnnnnnnnnnnnnnnnnnnnnnnnnnnnnnnnnnnnnnnnnnnnnnnnnnnnnnnnnnnnnnnnnnnnnnnnnnnnnnnnnnnnnnnnnnnnnnnnnnnnnnnnnnnnnnnnnnnnnnnnnnnnnnnnnnnnnnnnnnnnnnnnnnnnnnnnnnnnnnnnnnnnnnnnnnnnnnnnnnnnnnnnnnnnnnnnnnnnnnnnnnnnnnnnnnnnnnnnnnnnnnnnnnnnnnnnnnnnnnnnnnnnnnnnnnnnnnnnnnnnnnnnnnnnnnnnnnnnnnnnnnnnnnnnnnnnnnnnnnnnnnnnnnnnnnnnnnnnnnnnnnnnnnnnnnnnnnnnnnnnnnnnnnnnnnnnnnnnnnnnnnnnnnnnnnnnnnnnnnnnnnnnnnnnnnnnnnnnnnnnnnnnnnnnnnnnnnnnnnnnnnnnnnnnnnnnnnnnnnnnnnnnnnnnnnnnnnnnnnnnnnnnnnnnnnnnnnnnnnnnnnnnnnnnnnnnnnnnnnnnnnnnnnnnnnnnnnnnnnnnnnnnnnnnnnnnnnnnnnnnnnnnnnnnnnnnnnnnnnnnnnnnnnnnnnnnnnnnnnnnnnnnnnnnnnnnnnnnnnnnnnnnnnnnnnnnnnnnnnnnnnnnnnnnnnnnnnnnnnnnnnnnnnnnnnnnnnnnnnnnnnnnnnnnnnnnnnnnnnnnnnnnnnnnnnnnnnnnnnnnnnnnnnnnnnnnnnnnnnnnnnnnnnnnnnnnnnnnnnnnnnnnnnnnnnnnnnnnnnnnnnnnnnnnnnnnnnnnnnnnnnnnnnnnnnnnnnnnnnnnnnnnnnnnnnnnnnnnnnnnnnnnnnnnnnnnnnnnnnnnnnnnnnnnnnnnnnnnnnnnnnnnnnnnnnnnnnnnnnnnnnnnnnnnnnnnnnnnnnnnnnnnnnnnnnnnnnnnnnnnnnnnnnnnnnnnnnnnnnnnnnnnnnnnnnnnnnnnnnnnnnnnnnnnnnnnnnnnnnnnnnnnnnnnnnnnnnnnnnnnnnnnnnnnnnnnnnnnnnnnnnnnnnnnnnnnnnnnnnnnnnnnnnnnnnnnnnnnnnnnnnnnnnnnnnnnnnnnnnnnnnnnnnnnnnnnnnnnnnnnnnnnnnnnnnnnnnnnnnnnnnnnnnnnnnnnnnnnnnnnnnnnnnnnnnnnnnnnnnnnnnnnnnnnnnnnnnnnnnnnnnnnnnnnnnnnnnnnnnnnnnnnnnnnnnnnnnnnnnnnnnnnnnnnnnnnnnnnnnnnnnnnnnnnnnnnnnnnnnnnnnnnnnnnnnnnnnnnnnnnnnnnnnnnnnnnnnnnnnnnnnnnnnnnnnnnnnnnnnnnnnnnnnnnnnnnnnnnnnnnnnnnnnnnnnnnnnnnnnnnnnnnnnnnnnnnnnnnnnnnnnnnnnnnnnnnnnnnnnnnnnnnnnnnnnnnnnnnnnnnnnnnnnnnnnnnnnnnnnnnnnnnnnnnnnnnnnnnnnnnnnnnnnnnnnnnnnnnnnnnnnnnnnnnnnnnnnnnnnnnnnnnnnnnnnnnnnnnnnnnnnnnnnnnnnnnnnnnnnnnnnnnnnnnnnnnnnnnnnnnnnnnnnnnnnnnnnnnnnnnnnnnnnnnnnnnnnnnnnnnnnnnnnnnnnnnnnnnnnnnnnnnnnnnnnnnnnnnnnnnnnnnnnnnnnnnnnnnnnnnnnnnnnnnnnnnnnnnnnnnnnnnnnnnnnnnnnnnnnnnnnnnnnnnnnnnnnnnnnnnnnnnnnnnnnnnnnnnnnnnnnnnnnnnnnnnnnnnnnnnnnnnnnnnnnnnnnnnnnnnnnnnnnnnnnnnnnnnnnnnnnnnnnnnnnnnnnnnnnnnnnnnnnnnnnnnnnnnnnnnnnnnnnnnnnnnnnnnnnnnnnnnnnnnnnnnnnnnnnnnnnnnnnnnnnnnnnnnnnnnnnnnnnnnnnnnnnnnnnnnnnnnnnnnnnnnnnnnnnnnnnnnnnnnnnnnnnnnnnnnnnnnnnnnnnnnnnnnnnnnnnnnnnnnnnnnnnnnnnnnnnnnnnnnnnnnnnnnnnnnnnnnnnnnnnnnnnnnnnnnnnnnnnnnnnnnnnnnnnnnnnnnnnnnnnnnnnnnnnnnnnnnnnnnnnnnnnnnnnnnnnnnnnnnnnnnnnnnnnnnnnnnnnnnnnnnnnnnnnnnnnnnnnnnnnnnnnnnnnnnnnnnnnnnnnnnnnnnnnnnnnnnnnnnnnnnnnnnnnnnnnnnnnnnnnnnnnnnnnnnnnnnnnnnnnnnnnnnnnnnnnnnnnnnnnnnnnnnnnnnnnnnnnnnnnnnnnnnnnnnnnnnnnnnnnnnnnnnnnnnnnnnnnnnnnnnnnnnnnnnnnnnnnnnnnnnnnnnnnnnnnnnnnnnnnnnnnnnnnnnnnnnnnnnnnnnnnnnnnnnnnnnnnnnnnnnnnnnnnnnnnnnnnnnnnnnnnnnnnnnnnnnnnnnnnnnnnnnnnnnnnnnnnnnnnnnnnnnnnnnnnnnnnnnnnnnnnnnnnnnnnnnnnnnnnnnnnnnnnnnnnnnnnnnnnnnnnnnnnnnnnnnnnnnnnnnnnnnnnnnnnnnnnnnnnnnnnnnnnnnnnnnnnnnnnnnnnnnnnnnnnnnnnnnnnnnnnnnnnnnnnnnnnnnnnnnnnnnnnnnnnnnnnnnnnnnnnnnnnnnnnnnnnnnnnnnnnnnnnnnnnnnnnnnnnnnnnnnnnnnnnnnnnnnnnnnnnnnnnnnnnnnnnnnnnnnnnnnnnnnnnnnnnnnnnnnnnnnnnnnnnnnnnnnnnnnnnnnnnnnnnnnnnnnnnnnnnnnnnnnnnnnnnnnnnnnnnnnnnnnnnnnnnnnnnnnnnnnnnnnnnnnnnnnnnnnnnnnnnnnnnnnnnnnnnnnnnnnnnnnnnnnnnnnnnnnnnnnnnnnnnnnnnnnnnnnnnnnnnnnnnnnnnnnnnnnnnnnnnnnnnnnnnnnnnnnnnnnnnnnnnnnnnnnnnnnnnnnnnnnnnnnnnnnnnnnnnnnnnnnnnnnnnnnnnnnnnnnnnnnnnnnnnnnnnnnnnnnnnnnnnnnnnnnnnnnnnnnnnnnnnnnnnnnnnnnnnnnnnnnnnnnnnnnnnnnnnnnnnnnnnnnnnnnnnnnnnnnnnnnnnnnnnnnnnnnnnnnnnnnnnnnnnnnnnnnnnnnnnnnnnnnnnnnnnnnnnnnnnnnnnnnnnnnnnnnnnnnnnnnnnnnnnnnnnnnnnnnnnnnnnnnnnnnnnnnnnnnnnnnnnnnnnnnnnnnnnnnnnnnnnnnnnnnnnnnnnnnnnnnnnnnnnnnnnnnnnnnnnnnnnnnnnnnnnnnnnnnnnnnnnnnnnnnnnnnnnnnnnnnnnnnnnnnnnnnnnnnnnnnnnnnnnnnnnnnnnnnnnnnnnnnnnnnnnnnnnnnnnnnnnnnnnnnnnnnnnnnnnnnnnnnnnnnnnnnnnnnnnnnnnnnnnnnnnnnnnnnnnnnnnnnnnnnnnnnnnnnnnnnnnnnnnnnnnnnnnnnnnnnnnnnnnnnnnnnnnnnnnnnnnnnnnnnnnnnnnnnnnnnnnnnnnnnnnnnnnnnnnnnnnnnnnnnnnnnnnnnnnnnnnnnnnnnnnnnnnnnnnnnnnnnnnnnnnnnnnnnnnnnnnnnnnnnnnnnnnnnnnnnnnnnnnnnnnnnnnnnnnnnnnnnnnnnnnnnnnnnnnnnnnnnnnnnnnnnnnnnnnnnnnnnnnnnnnnnnnnnnnnnnnnnnnnnnnnnnnnnnnnnnnnnnnnnnnnnnnnnnnnnnnnnnnnnnnnnnnnnnnnnnnnnnnnnnnnnnnnnnnnnnnnnnnnnnnnnnnnnnnnnnnnnnnnnnnnnnnnnnnnnnnnnnnnnnnnnnnnnnnnnnnnnnnnnnnnnnnnnnnnnnnnnnnnnnnnnnnnnnnnnnnnnnnnnnnnnnnnnnnnnnnnnnnnnnnnnnnnnnnnnnnnnnnnnnnnnnnnnnnnnnnnnnnnnnnnnnnnnnnnnnnnnnnnnnnnnnnnnnnnnnnnnnnnnnnnnnnnnnnnnnnnnnnnnnnnnnnnnnnnnnnnnnnnnnnnnnnnnnnnnnnnnnnnnnnnnnnnnnnnnnnnnnnnnnnnnnnnnnnnnnnnnnnnnnnnnnnnnnnnnnnnnnnnnnnnnnnnnnnnnnnnnnnnnnnnnnnnnnnnnnnnnnnnnnnnnnnnnnnnnnnnnnnnnnnnnnnnnnnnnnnnnnnnnnnnnnnnnnnnnnnnnnnnnnnnnnnnnnnnnnnnnnnnnnnnnnnnnnnnnnnnnnnnnnnnnnnnnnnnnnnnnnnnnnnnnnnnnnnnnnnnnnnnnnnnnnnnnnnnnnnnnnnnnnnnnnnnnnnnnnnnnnnnnnnnnnnnnnnnnnnnnnnnnnnnnnnnnnnnnnnnnnnnnnnnnnnnnnnnnnnnnnnnnnnnnnnnnnnnnnnnnnnnnnnnnnnnnnnnnnnnnnnnnnnnnnnnnnnnnnnnnnnnnnnnnnnnnnnnnnnnnnnnnnnnnnnnnnnnnnnnnnnnnnnnnnnnnnnnnnnnnnnnnnnnnnnnnnnnnnnnnnnnnnnnnnnnnnnnnnnnnnnnnnnnnnnnnnnnnnnnnnnnnnnnnnnnnnnnnnnnnnnnnnnnnnnnnnnnnnnnnnnnnnnnnnnnnnnnnnnnnnnnnnnnnnnnnnnnnnnnnnnnnnnnnnnnnnnnnnnnnnnnnnnnnnnnnnnnnnnnnnnnnnnnnnnnnnnnnnnnnnnnnnnnnnnnnnnnnnnnnnnnnnnnnnnnnnnnnnnnnnnnnnnnnnnnnnnnnnnnnnnnnnnnnnnnnnnnnnnnnnnnnnnnnnnnnnnnnnnnnnnnnnnnnnnnnnnnnnnnnnnnnnnnnnnnnnnnnnnnnnnnnnnnnnnnnnnnnnnnnnnnnnnnnnnnnnnnnnnnnnnnnnnnnnnnnnnnnnnnnnnnnnnnnnnnnnnnnnnnnnnnnnnnnnnnnnnnnnnnnnnnnnnnnnnnnnnnnnnnnnnnnnnnnnnnnnnnnnnnnnnnnnnnnnnnnnnnnnnnnnnnnnnnnnnnnnnnnnnnnnnnnnnnnnnnnnnnnnnnnnnnnnnnnnnnnnnnnnnnnnnnnnnnnnnnnnnnnnnnnnnnnnnnnnnnnnnnnnnnnnnnnnnnnnnnnnnnnnnnnnnnnnnnnnnnnnnnnnnnnnnnnnnnnnnnnnnnnnnnnnnnnnnnnnnnnnnnnnnnnnnnnnnnnnnnnnnnnnnnnnnnnnnnnnnnnnnnnnnnnnnnnnnnnnnnnnnnnnnnnnnnnnnnnnnnnnnnnnnnnnnnnnnnnnnnnnnnnnnnnnnnnnnnnnnnnnnnnnnnnnnnnnnnnnnnnnnnnnnnnnnnnnnnnnnnnnnnnnnnnnnnnnnnnnnnnnnnnnnnnnnnnnnnnnnnnnnnnnnnnnnnnnnnnnnnnnnnnnnnnnnnnnnnnnnnnnnnnnnnnnnnnnnnnnnnnnnnnnnnnnnnnnnnnnnnnnnnnnnnnnnnnnnnnnnnnnnnnnnnnnnnnnnnnnnnnnnnnnnnnnnnnnnnnnnnnnnnnnnnnnnnnnnnnnnnnnnnnnnnnnnnnnnnnnnnnnnnnnnnnnnnnnnnnnnnnnnnnnnnnnnnnnnnnnnnnnnnnnnnnnnnnnnnnnnnnnnnnnnnnnnnnnnnnnnnnnnnnnnnnnnnnnnnnnnnnnnnnnnnnnnnnnnnnnnnnnnnnnnnnnnnnnnnnnnnnnnnnnnnnnnnnnnnnnnnnnnnnnnnnnnnnnnnnnnnnnnnnnnnnnnnnnnnnnnnnnnnnnnnnnnnnnnnnnnnnnnnnnnnnnnnnnnnnnnnnnnnnnnnnnnnnnnnnnnnnnnnnnnnnnnnnnnnnnnnnnnnnnnnnnnnnnnnnnnnnnnnnnnnnnnnnnnnnnnnnnnnnnnnnnnnnnnnnnnnnnnnnnnnnnnnnnnnnnnnnnnnnnnnnnnnnnnnnnnnnnnnnnnnnnnnnnnnnnnnnnnnnnnnnnnnnnnnnnnnnnnnnnnnnnnnnnnnnnnnnnnnnnnnnnnnnnnnnnnnnnnnnnnnnnnnnnnnnnnnnnnnnnnnnnnnnnnnnnnnnnnnnnnnnnnnnnnnnnnnnnnnnnnnnnnnnnnnnnnnnnnnnnnnnnnnnnnnnnnnnnnnnnnnnnnnnnnnnnnnnnnnnnnnnnnnnnnnnnnnnnnnnnnnnnnnnnnnnnnnnnnnnnnnnnnnnnnnnnnnnnnnnnnnnnnnnnnnnnnnnnnnnnnnnnnnnnnnnnnnnnnnnnnnnnnnnnnnnnnnnnnnnnnnnnnnnnnnnnnnnnnnnnnnnnnnnnnnnnnnnnnnnnnnnnnnnnnnnnnnnnnnnnnnnnnnnnnnnnnnnnnnnnnnnnnnnnnnnnnnnnnnnnnnnnnnnnnnnnnnnnnnnnnnnnnnnnnnnnnnnnnnnnnnnnnnnnnnnnnnnnnnnnnnnnnnnnnnnnnnnnnnnnnnnnnnnnnnnnnnnnnnnnnnnnnnnnnnnnnnnnnnnnnnnnnnnnnnnnnnnnnnnnnnnnnnnnnnnnnnnnnnnnnnnnnnnnnnnnnnnnnnnnnnnnnnnnnnnnnnnnnnnnnnnnnnnnnnnnnnnnnnnnnnnnnnnnnnnnnnnnnnnnnnnnnnnnnnnnnnnnnnnnnnnnnnnnnnnnnnnnnnnnnnnnnnnnnnnnnnnnnnnnnnnnnnnnnnnnnnnnnnnnnnnnnnnnnnnnnnnnnnnnnnnnnnnnnnnnnnnnnnnnnnnnnnnnnnnnnnnnnnnnnnnnnnnnnnnnnnnnnnnnnnnnnnnnnnnnnnnnnnnnnnnnnnnnnnnnnnnnnnnnnnnnnnnnnnnnnnnnnnnnnnnnnnnnnnnnnnnnnnnnnnnnnnnnnnnnnnnnnnnnnnnnnnnnnnnnnnnnnnnnnnnnnnnnnnnnnnnnnnnnnnnnnnnnnnnnnnnnnnnnnnnnnnnnnnnnnnnnnnnnnnnnnnnnnnnnnnnnnnnnnnnnnnnnnnnnnnnnnnnnnnnnnnnnnnnnnnnnnnnnnnnnnnnnnnnnnnnnnnnnnnnnnnnnnnnnnnnnnnnnnnnnnnnnnnnnnnnnnnnnnnnnnnnnnnnnnnnnnnnnnnnnnnnnnnnnnnnnnnnnnnnnnnnnnnnnnnnnnnnnnnnnnnnnnnnnnnnnnnnnnnnnnnnnnnnnnnnnnnnnnnnnnnnnnnnnnnnnnnnnnnnnnnnnnnnnnnnnnnnnnnnnnnnnnnnnnnnnnnnnnnnnnnnnnnnnnnnnnnnnnnnnnnnnnnnnnnnnnnnnnnnnnnnnnnnnnnnnnnnnnnnnnnnnnnnnnnnnnnnnnnnnnnnnnnnnnnnnnnnnnnnnnnnnnnnnnnnnnnnnnnnnnnnnnnnnnnnnnnnnnnnnnnnnnnnnnnnnnnnnnnnnnnnnnnnnnnnnnnnnnnnnnnnnnnnnnnnnnnnnnnnnnnnnnnnnnnnnnnnnnnnnnnnnnnnnnnnnnnnnnnnnnnnnnnnnnnnnnnnnnnnnnnnnnnnnnnnnnnnnnnnnnnnnnnnnnnnnnnnnnnnnnnnnnnnnnnnnnnnnnnnnnnnnnnnnnnnnnnnnnnnnnnnnnnnnnnnnnnnnnnnnnnnnnnnnnnnnnnnnnnnnnnnnnnnnnnnnnnnnnnnnnnnnnnnnnnnnnnnnnnnnnnnnnnnnnnnnnnnnnnnnnnnnnnnnnnnnnnnnnnnnnnnnnnnnnnnnnnnnnnnnnnnnnnnnnnnnnnnnnnnnnnnnnnnnnnnnnnnnnnnnnnnnnnnnnnnnnnnnnnnnnnnnnnnnnnnnnnnnnnnnnnnnnnnnnnnnnnnnnnnnnnnnnnnnnnnnnnnnnnnnnnnnnnnnnnnnnnnnnnnnnnnnnnnnnnnnnnnnnnnnnnnnnnnnnnnnnnnnnnnnnnnnnnnnnnnnnnnnnnnnnnnnnnnnnnnnnnnnnnnnnnnnnnnnnnnnnnnnnnnnnnnnnnnnnnnnnnnnnnnnnnnnnnnnnnnnnnnnnnnnnnnnnnnnnnnnnnnnnnnnnnnnnnnnnnnnnnnnnnnnnnnnnnnnnnnnnnnnnnnnnnnnnnnnnnnnnnnnnnnnnnnnnnnnnnnnnnnnnnnnnnnnnnnnnnnnnnnnnnnnnnnnnnnnnnnnnnnnnnnnnnnnnnnnnnnnnnnnnnnnnnnnnnnnnnnnnnnnnnnnnnnnnnnnnnnnnnnnnnnnnnnnnnnnnnnnnnnnnnnnnnnnnnnnnnnnnnnnnnnnnnnnnnnnnnnnnnnnnnnnnnnnnnnnnnnnnnnnnnnnnnnnnnnnnnnnnnnnnnnnnnnnnnnnnnnnnnnnnnnnnnnnnnnnnnnnnnnnnnnnnnnnnnnnnnnnnnnnnnnnnnnnnnnnnnnnnnnnnnnnnnnnnnnnnnnnnnnnnnnnnnnnnnnnnnnnnnnnnnnnnnnnnnnnnnnnnnnnnnnnnnnnnnnnnnnnnnnnnnnnnnnnnnnnnnnnnnnnnnnnnnnnnnnnnnnnnnnnnnnnnnnnnnnnnnnnnnnnnnnnnnnnnnnnnnnnnnnnnnnnnnnnnnnnnnnnnnnnnnnnnnnnnnnnnnnnnnnnnnnnnnnnnnnnnnnnnnnnnnnnnnnnnnnnnnnnnnnnnnnnnnnnnnnnnnnnnnnnnnnnnnnnnnnnnnnnnnnnnnnnnnnnnnnnnnnnnnnnnnnnnnnnnnnnnnnnnnnnnnnnnnnnnnnnnnnnnnnnnnnnnnnnnnnnnnnnnnnnnnnnnnnnnnnnnnnnnnnnnnnnnnnnnnnnnnnnnnnnnnnnnnnnnnnnnnnnnnnnnnnnnnnnnnnnnnnnnnnnnnnnnnnnnnnnnnnnnnnnnnnnnnnnnnnnnnnnnnnnnnnnnnnnnnnnnnnnnnnnnnnnnnnnnnnnnnnnnnnnnnnnnnnnnnnnnnnnnnnnnnnnnnnnnnnnnnnnnnnnnnnnnnnnnnnnnnnnnnnnnnnnnnnnnnnnnnnnnnnnnnnnnnnnnnnnnnnnnnnnnnnnnnnnnnnnnnnnnnnnnnnnnnnnnnnnnnnnnnnnnnnnnnnnnnnnnnnnnnnnnnnnnnnnnnnnnnnnnnnnnnnnnnnnnnnnnnnnnnnnnnnnnnnnnnnnnnnnnnnnnnnnnnnnnnnnnnnnnnnnnnnnnnnnnnnnnnnnnnnnnnnnnnnnnnnnnnnnnnnnnnnnnnnnnnnnnnnnnnnnnnnnnnnnnnnnnnnnnnnnnnnnnnnnnnnnnnnnnnnnnnnnnnnnnnnnnnnnnnnnnnnnnnnnnnnnnnnnnnnnnnnnnnnnnnnnnnnnnnnnnnnnnnnnnnnnnnnnnnnnnnnnnnnnnnnnnnnnnnnnnnnnnnnnnnnnnnnnnnnnnnnnnnnnnnnnnnnnnnnnnnnnnnnnnnnnnnnnnnnnnnnnnnnnnnnnnnnnnnnnnnnnnnnnnnnnnnnnnnnnnnnnnnnnnnnnnnnnnnnnnnnnnnnnnnnnnnnnnnnnnnnnnnnnnnnnnnnnnnnnnnnnnnnnnnnnnnnnnnnnnnnnnnnnnnnnnnnnnnnnnnnnnnnnnnnnnnnnnnnnnnnnnnnnnnnnnnnnnnnnnnnnnnnnnnnnnnnnnnnnnnnnnnnnnnnnnnnnnnnnnnnnnnnnnnnnnnnnnnnnnnnnnnnnnnnnnnnnnnnnnnnnnnnnnnnnnnnnnnnnnnnnnnnnnnnnnnnnnnnnnnnnnnnnnnnnnnnnnnnnnnnnnnnnnnnnnnnnnnnnnnnnnnnnnnnnnnnnnnnnnnnnnnnnnnnnnnnnnnnnnnnnnnnnnnnnnnnnnnnnnnnnnnnnnnnnnnnnnnnnnnnnnnnnnnnnnnnnnnnnnnnnnnnnnnnnnnnnnnnnnnnnnnnnnnnnnnnnnnnnnnnnnnnnnnnnnnnnnnnnnnnnnnnnnnnnnnnnnnnnnnnnnnnnnnnnnnnnnnnnnnnnnnnnnnnnnnnnnnnnnnnnnnnnnnnnnnnnnnnnnnnnnnnnnnnnnnnnnnnnnnnnnnnnnnnnnnnnnnnnnnnnnnnnnnnnnnnnnnnnnnnnnnnnnnnnnnnnnnnnnnnnnnnnnnnnnnnnnnnnnnnnnnnnnnnnnnnnnnnnnnnnnnnnnnnnnnnnnnnnnnnnnnnnnnnnnnnnnnnnnnnnnnnnnnnnnnnnnnnnnnnnnnnnnnnnnnnnnnnnnnnnnnnnnnnnnnnnnnnnnnnnnnnnnnnnnnnnnnnnnnnnnnnnnnnnnnnnnnnnnnnnnnnnnnnnnnnnnnnnnnnnnnnnnnnnnnnnnnnnnnnnnnnnnnnnnnnnnnnnnnnnnnnnnnnnnnnnnnnnnnnnnnnnnnnnnnnnnnnnnnnnnnnnnnnnnnnnnnnnnnnnnnnnnnnnnnnnnnnnnnnnnnnnnnnnnnnnnnnnnnnnnnnnnnnnnnnnnnnnnnnnnnnnnnnnnnnnnnnnnnnnnnnnnnnnnnnnnnnnnnnnnnnnnnnnnnnnnnnnnnnnnnnnnnnnnnnnnnnnnnnnnnnnnnnnnnnnnnnnnnnnnnnnnnnnnnnnnnnnnnnnnnnnnnnnnnnnnnnnnnnnnnnnnnnnnnnnnnnnnnnnnnnnnnnnnnnnnnnnnnnnnnnnnnnnnnnnnnnnnnnnnnnnnnnnnnnnnnnnnnnnnnnnnnnnnnnnnnnnnnnnnnnnnnnnnnnnnnnnnnnnnnnnnnnnnnnnnnnnnnnnnnnnnnnnnnnnnnnnnnnnnnnnnnnnnnnnnnnnnnnnnnnnnnnnnnnnnnnnnnnnnnnnnnnnnnnnnnnnnnnnnnnnnnnnnnnnnnnnnnnnnnnnnnnnnnnnnnnnnnnnnnnnnnnnnnnnnnnnnnnnnnnnnnnnnnnnnnnnnnnnnnnnnnnnnnnnnnnnnnnnnnnnnnnnnnnnnnnnnnnnnnnnnnnnnnnnnnnnnnnnnnnnnnnnnnnnnnnnnnnnnnnnnnnnnnnnnnnnnnnnnnnnnnnnnnnnnnnnnnnnnnnnnnnnnnnnnnnnnnnnnnnnnnnnnnnnnnnnnnnnnnnnnnnnnnnnnnnnnnnnnnnnnnnnnnnnnnnnnnnnnnnnnnnnnnnnnnnnnnnnnnnnnnnnnnnnnnnnnnnnnnnnnnnnnnnnnnnnnnnnnnnnnnnnnnnnnnnnnnnnnnnnnnnnnnnnnnnnnnnnnnnnnnnnnnnnnnnnnnnnnnnnnnnnnnnnnnnnnnnnnnnnnnnnnnnnnnnnnnnnnnnnnnnnnnnnnnnnnnnnnnnnnnnnnnnnnnnnnnnnnnnnnnnnnnnnnnnnnnnnnnnnnnnnnnnnnnnnnnnnnnnnnnnnnnnnnnnnnnnnnnnnnnnnnnnnnnnnnnnnnnnnnnnnnnnnnnnnnnnnnnnnnnnnnnnnnnnnnnnnnnnnnnnnnnnnnnnnnnnnnnnnnnnnnnnnnnnnnnnnnnnnnnnnnnnnnnnnnnnnnnnnnnnnnnnnnnnnnnnnnnnnnnnnnnnnnnnnnnnnnnnnnnnnnnnnnnnnnnnnnnnnnnnnnnnnnnnnnnnnnnnnnnnnnnnnnnnnnnnnnnnnnnnnnnnnnnnnnnnnnnnnnnnnnnnnnnnnnnnnnnnnnnnnnnnnnnnnnnnnnnnnnnnnnnnnnnnnnnnnnnnnnnnnnnnnnnnnnnnnnnnnnnnnnnnnnnnnnnnnnnnnnnnnnnnnnnnnnnnnnnnnnnnnnnnnnnnnnnnnnnnnnnnnnnnnnnnnnnnnnnnnnnnnnnnnnnnnnnnnnnnnnnnnnnnnnnnnnnnnnnnnnnnnnnnnnnnnnnnnnnnnnnnnnnnnnnnnnnnnnnnnnnnnnnnnnnnnnnnnnnnnnnnnnnnnnnnnnnnnnnnnnnnnnnnnnnnnnnnnnnnnnnnnnnnnnnnnnnnnnnnnnnnnnnnnnnnnnnnnnnnnnnnnnnnnnnnnnnnnnnnnnnnnnnnnnnnnnnnnnnnnnnnnnnnnnnnnnnnnnnnnnnnnnnnnnnnnnnnnnnnnnnnnnnnnnnnnnnnnnnnnnnnnnnnnnnnnnnnnnnnnnnnnnnnnnnnnnnnnnnnnnnnnnnnnnnnnnnnnnnnnnnnnnnnnnnnnnnnnnnnnnnnnnnnnnnnnnnnnnnnnnnnnnnnnnnnnnnnnnnnnnnnnnnnnnnnnnnnnnnnnnnnnnnnnnnnnnnnnnnnnnnnnnnnnnnnnnnnnnnnnnnnnnnnnnnnnnnnnnnnnnnnnnnnnnnnnnnnnnnnnnnnnnnnnnnnnnnnnnnnnnnnnnnnnnnnnnnnnnnnnnnnnnnnnnnnnnnnnnnnnnnnnnnnnnnnnnnnnnnnnnnnnnnnnnnnnnnnnnnnnnnnnnnnnnnnnnnnnnnnnnnnnnnnnnnnnnnnnnnnnnnnnnnnnnnnnnnnnnnnnnnnnnnnnnnnnnnnnnnnnnnnnnnnnnnnnnnnnnnnnnnnnnnnnnnnnnnnnnnnnnnnnnnnnnnnnnnnnnnnnnnnnnnnnnnnnnnnnnnnnnnnnnnnnnnnnnnnnnnnnnnnnnnnnnnnnnnnnnnnnnnnnnnnnnnnnnnnnnnnnnnnnnnnnnnnnnnnnnnnnnnnnnnnnnnnnnnnnnnnnnnnnnnnnnnnnnnnnnnnnnnnnnnnnnnnnnnnnnnnnnnnnnnnnnnnnnnnnnnnnnnnnnnnnnnnnnnnnnnnnnnnnnnnnnnnnnnnnnnnnnnnnnnnnnnnnnnnnnnnnnnnnnnnnnnnnnnnnnnnnnnnnnnnnnnnnnnnnnnnnnnnnnnnnnnnnnnnnnnnnnnnnnnnnnnnnnnnnnnnnnnnnnnnnnnnnnnnnnnnnnnnnnnnnnnnnnnnnnnnnnnnnnnnnnnnnnnnnnnnnnnnnnnnnnnnnnnnnnnnnnnnnnnnnnnnnnnnnnnnnnnnnnnnnnnnnnnnnnnnnnnnnnnnnnnnnnnnnnnnnnnnnnnnnnnnnnnnnnnnnnnnnnnnnnnnnnnnnnnnnnnnnnnnnnnnnnnnnnnnnnnnnnnnnnnnnnnnnnnnnnnnnnnnnnnnnnnnnnnnnnnnnnnnnnnnnnnnnnnnnnnnnnnnnnnnnnnnnnnnnnnnnnnnnnnnnnnnnnnnnnnnnnnnnnnnnnnnnnnnnnnnnnnnnnnnnnnnnnnnnnnnnnnnnnnnnnnnnnnnnnnnnnnnnnnnnnnnnnnnnnnnnnnnnnnnnnnnnnnnnnnnnnnnnnnnnnnnnnnnnnnnnnnnnnnnnnnnnnnnnnnnnnnnnnnnnnnnnnnnnnnnnnnnnnnnnnnnnnnnnnnnnnnnnnnnnnnnnnnnnnnnnnnnnnnnnnnnnnnnnnnnnnnnnnnnnnnnnnnnnnnnnnnnnnnnnnnnnnnnnnnnnnnnnnnnnnnnnnnnnnnnnnnnnnnnnnnnnnnnnnnnnnnnnnnnnnnnnnnnnnnnnnnnnnnnnnnnnnnnnnnnnnnnnnnnnnnnnnnnnnnnnnnnnnnnnnnnnnnnnnnnnnnnnnnnnnnnnnnnnnnnnnnnnnnnnnnnnnnnnnnnnnnnnnnnnnnnnnnnnnnnnnnnnnnnnnnnnnnnnnnnnnnnnnnnnnnnnnnnnnnnnnnnnnnnnnnnnnnnnnnnnnnnnnnnnnnnnnnnnnnnnnnnnnnnnnnnnnnnnnnnnnnnnnnnnnnnnnnnnnnnnnnnnnnnnnnnnnnnnnnnnnnnnnnnnnnnnnnnnnnnnnnnnnnnnnnnnnnnnnnnnnnnnnnnnnnnnnnnnnnnnnnnnnnnnnnnnnnnnnnnnnnnnnnnnnnnnnnnnnnnnnnnnnnnnnnnnnnnnnnnnnnnnnnnnnnnnnnnnnnnnnnnnnnnnnnnnnnnnnnnnnnnnnnnnnnnnnnnnnnnnnnnnnnnnnnnnnnnnnnnnnnnnnnnnnnnnnnnnnnnnnnnnnnnnnnnnnnnnnnnnnnnnnnnnnnnnnnnnnnnnnnnnnnnnnnnnnnnnnnnnnnnnnnnnnnnnnnnnnnnnnnnnnnnnnnnnnnnnnnnnnnnnnnnnnnnnnnnnnnnnnnnnnnnnnnnnnnnnnnnnnnnnnnnnnnnnnnnnnnnnnnnnnnnnnnnnnnnnnnnnnnnnnnnnnnnnnnnnnnnnnnnnnnnnnnnnnnnnnnnnnnnnnnnnnnnnnnnnnnnnnnnnnnnnnnnnnnnnnnnnnnnnnnnnnnnnnnnnnnnnnnnnnnnnnnnnnnnnnnnnnnnnnnnnnnnnnnnnnnnnnnnnnnnnnnnnnnnnnnnnnnnnnnnnnnnnnnnnnnnnnnnnnnnnnnnnnnnnnnnnnnnnnnnnnnnnnnnnnnnnnnnnnnnnnnnnnnnnnnnnnnnnnnnnnnnnnnnnnnnnnnnnnnnnnnnnnnnnnnnnnnnnnnnnnnnnnnnnnnnnnnnnnnnnnnnnnnnnnnnnnnnnnnnnnnnnnnnnnnnnnnnnnnnnnnnnnnnnnnnnnnnnnnnnnnnnnnnnnnnnnnnnnnnnnnnnnnnnnnnnnnnnnnnnnnnnnnnnnnnnnnnnnnnnnnnnnnnnnnnnnnnnnnnnnnnnnnnnnnnnnnnnnnnnnnnnnnnnnnnnnnnnnnnnnnnnnnnnnnnnnnnnnnnnnnnnnnnnnnnnnnnnnnnnnnnnnnnnnnnnnnnnnnnnnnnnnnnnnnnnnnnnnnnnnnnnnnnnnnnnnnnnnnnnnnnnnnnnnnnnnnnnnnnnnnnnnnnnnnnnnnnnnnnnnnnnnnnnnnnnnnnnnnnnnnnnnnnnnnnnnnnnnnnnnnnnnnnnnnnnnnnnnnnnnnnnnnnnnnnnnnnnnnnnnnnnnnnnnnnnnnnnnnnnnnnnnnnnnnnnnnnnnnnnnnnnnnnnnnnnnnnnnnnnnnnnnnnnnnnnnnnnnnnnnnnnnnnnnnnnnnnnnnnnnnnnnnnnnnnnnnnnnnnnnnnnnnnnnnnnnnnnnnnnnnnnnnnnnnnnnnnnnnnnnnnnnnnnnnnnnnnnnnnnnnnnnnnnnnnnnnnnnnnnnnnnnnnnnnnnnnnnnnnnnnnnnnnnnnnnnnnnnnnnnnnnnnnnnnnnnnnnnnnnnnnnnnnnnnnnnnnnnnnnnnnnnnnnnnnnnnnnnnnnnnnnnnnnnnnnnnnnnnnnnnnnnnnnnnnnnnnnnnnnnnnnnnnnnnnnnnnnnnnnnnnnnnnnnnnnnnnnnnnnnnnnnnnnnnnnnnnnnnnnnnnnnnnnnnnnnnnnnnnnnnnnnnnnnnnnnnnnnnnnnnnnnnnnnnnnnnnnnnnnnnnnnnnnnnnnnnnnnnnnnnnnnnnnnnnnnnnnnnnnnnnnnnnnnnnnnnnnnnnnnnnnnnnnnnnnnnnnnnnnnnnnnnnnnnnnnnnnnnnnnnnnnnnnnnnnnnnnnnnnnnnnnnnnnnnnnnnnnnnnnnnnnnnnnnnnnnnnnnnnnnnnnnnnnnnnnnnnnnnnnnnnnnnnnnnnnnnnnnnnnnnnnnnnnnnnnnnnnnnnnnnnnnnnnnnnnnnnnnnnnnnnnnnnnnnnnnnnnnnnnnnnnnnnnnnnnnnnnnnnnnnnnnnnnnnnnnnnnnnnnnnnnnnnnnnnnnnnnnnnnnnnnnnnnnnnnnnnnnnnnnnnnnnnnnnnnnnnnnnnnnnnnnnnnnnnnnnnnnnnnnnnnnnnnnnnnnnnnnnnnnnnnnnnnnnnnnnnnnnnnnnnnnnnnnnnnnnnnnnnnnnnnnnnnnnnnnnnnnnnnnnnnnnnnnnnnnnnnnnnnnnnnnnnnnnnnnnnnnnnnnnnnnnnnnnnnnnnnnnnnnnnnnnnnnnnnnnnnnnnnnnnnnnnnnnnnnnnnnnnnnnnnnnnnnnnnnnnnnnnnnnnnnnnnnnnnnnnnnnnnnnnnnnnnnnnnnnnnnnnnnnnnnnnnnnnnnnnnnnnnnnnnnnnnnnnnnnnnnnnnnnnnnnnnnnnnnnnnnnnnnnnnnnnnnnnnnnnnnnnnnnnnnnnnnnnnnnnnnnnnnnnnnnnnnnnnnnnnnnnnnnnnnnnnnnnnnnnnnnnnnnnnnnnnnnnnnnnnnnnnnnnnnnnnnnnnnnnnnnnnnnnnnnnnnnnnnnnnnnnnnnnnnnnnnnnnnnnnnnnnnnnnnnnnnnnnnnnnnnnnnnnnnnnnnnnnnnnnnnnnnnnnnnnnnnnnnnnnnnnnnnnnnnnnnnnnnnnnnnnnnnnnnnnnnnnnnnnnnnnnnnnnnnnnnnnnnnnnnnnnnnnnnnnnnnnnnnnnnnnnnnnnnnnnnnnnnnnnnnnnnnnnnnnnnnnnnnnnnnnnnnnnnnnnnnnnnnnnnnnnnnnnnnnnnnnnnnnnnnnnnnnnnnnnnnnnnnnnnnnnnnnnnnnnnnnnnnnnnnnnnnnnnnnnnnnnnnnnnnnnnnnnnnnnnnnnnnnnnnnnnnnnnnnnnnnnnnnnnnnnnnnnnnnnnnnnnnnnnnnnnnnnnnnnnnnnnnnnnnnnnnnnnnnnnnnnnnnnnnnnnnnnnnnnnnnnnnnnnnnnnnnnnnnnnnnnnnnnnnnnnnnnnnnnnnnnnnnnnnnnnnnnnnnnnnnnnnnnnnnnnnnnnnnnnnnnnnnnnnnnnnnnnnnnnnnnnnnnnnnnnnnnnnnnnnnnnnnnnnnnnnnnnnnnnnnnnnnnnnnnnnnnnnnnnnnnnnnnnnnnnnnnnnnnnnnnnnnnnnnnnnnnnnnnnnnnnnnnnnnnnnnnnnnnnnnnnnnnnnnnnnnnnnnnnnnnnnnnnnnnnnnnnnnnnnnnnnnnnnnnnnnnnnnnnnnnnnnnnnnnnnnnnnnnnnnnnnnnnnnnnnnnnnnnnnnnnnnnnnnnnnnnnnnnnnnnnnnnnnnnnnnnnnnnnnnnnnnnnnnnnnnnnnnnnnnnnnnnnnnnnnnnnnnnnnnnnnnnnnnnnnnnnnnnnnnnnnnnnnnnnnnnnnnnnnnnnnnnnnnnnnnnnnnnnnnnnnnnnnnnnnnnnnnnnnnnnnnnnnnnnnnnnnnnnnnnnnnnnnnnnnnnnnnnnnnnnnnnnnnnnnnnnnnnnnnnnnnnnnnnnnnnnnnnnnnnnnnnnnnnnnnnnnnnnnnnnnnnnnnnnnnnnnnnnnnnnnnnnnnnnnnnnnnnnnnnnnnnnnnnnnnnnnnnnnnnnnnnnnnnnnnnnnnnnnnnnnnnnnnnnnnnnnnnnnnnnnnnnnnnnnnnnnnnnnnnnnnnnnnnnnnnnnnnnnnnnnnnnnnnnnnnnnnnnnnnnnnnnnnnnnnnnnnnnnnnnnnnnnnnnnnnnnnnnnnnnnnnnnnnnnnnnnnnnnnnnnnnnnnnnnnnnnnnnnnnnnnnnnnnnnnnnnnnnnnnnnnnnnnnnnnnnnnnnnnnnnnnnnnnnnnnnnnnnnnnnnnnnnnnnnnnnnnnnnnnnnnnnnnnnnnnnnnnnnnnnnnnnnnnnnnnnnnnnnnnnnnnnnnnnnnnnnnnnnnnnnnnnnnnnnnnnnnnnnnnnnnnnnnnnnnnnnnnnnnnnnnnnnnnnnnnnnnnnnnnnnnnnnnnnnnnnnnnnnnnnnnnnnnnnnnnnnnnnnnnnnnnnnnnnnnnnnnnnnnnnnnnnnnnnnnnnnnnnnnnnnnnnnnnnnnnnnnnnnnnnnnnnnnnnnnnnnnnnnnnnnnnnnnnnnnnnnnnnnnnnnnnnnnnnnnnnnnnnnnnnnnnnnnnnnnnnnnnnnnnnnnnnnnnnnnnnnnnnnnnnnnnnnnnnnnnnnnnnnnnnnnnnnnnnnnnnnnnnnnnnnnnnnnnnnnnnnnnnnnnnnnnnnnnnnnnnnnnnnnnnnnnnnnnnnnnnnnnnnnnnnnnnnnnnnnnnnnnnnnnnnnnnnnnnnnnnnnnnnnnnnnnnnnnnnnnnnnnnnnnnnnnnnnnnnnnnnnnnnnnnnnnnnnnnnnnnnnnnnnnnnnnnnnnnnnnnnnnnnnnnnnnnnnnnnnnnnnnnnnnnnnnnnnnnnnnnnnnnnnnnnnnnnnnnnnnnnnnnnnnnnnnnnnnnnnnnnnnnnnnnnnnnnnnnnnnnnnnnnnnnnnnnnnnnnnnnnnnnnnnnnnnnnnnnnnnnnnnnnnnnnnnnnnnnnnnnnnnnnnnnnnnnnnnnnnnnnnnnnnnnnnnnnnnnnnnnnnnnnnnnnnnnnnnnnnnnnnnnnnnnnnnnnnnnnnnnnnnnnnnnnnnnnnnnnnnnnnnnnnnnnnnnnnnnnnnnnnnnnnnnnnnnnnnnnnnnnnnnnnnnnnnnnnnnnnnnnnnnnnnnnnnnnnnnnnnnnnnnnnnnnnnnnnnnnnnnnnnnnnnnnnnnnnnnnnnnnnnnnnnnnnnnnnnnnnnnnnnnnnnnnnnnnnnnnnnnnnnnnnnnnnnnnnnnnnnnnnnnnnnnnnnnnnnnnnnnnnnnnnnnnnnnnnnnnnnnnnnnnnnnnnnnnnnnnnnnnnnnnnnnnnnnnnnnnnnnnnnnnnnnnnnnnnnnnnnnnnnnnnnnnnnnnnnnnnnnnnnnnnnnnnnnnnnnnnnnnnnnnnnnnnnnnnnnnnnnnnnnnnnnnnnnnnnnnnnnnnnnnnnnnnnnnnnnnnnnnnnnnnnnnnnnnnnnnnnnnnnnnnnnnnnnnnnnnnnnnnnnnnnnnnnnnnnnnnnnnnnnnnnnnnnnnnnnnnnnnnnnnnnnnnnnnnnnnnnnnnnnnnnnnnnnnnnnnnnnnnnnnnnnnnnnnnnnnnnnnnnnnnnnnnnnnnnnnnnnnnnnnnnnnnnnnnnnnnnnnnnnnnnnnnnnnnnnnnnnnnnnnnnnnnnnnnnnnnnnnnnnnnnnnnnnnnnnnnnnnnnnnnnnnnnnnnnnnnnnnnnnnnnnnnnnnnnnnnnnnnnnnnnnnnnnnnnnnnnnnnnnnnnnnnnnnnnnnnnnnnnnnnnnnnnnnnnnnnnnnnnnnnnnnnnnnnnnnnnnnnnnnnnnnnnnnnnnnnnnnnnnnnnnnnnnnnnnnnnnnnnnnnnnnnnnnnnnnnnnnnnnnnnnnnnnnnnnnnnnnnnnnnnnnnnnnnnnnnnnnnnnnnnnnnnnnnnnnnnnnnnnnnnnnnnnnnnnnnnnnnnnnnnnnnnnnnnnnnnnnnnnnnnnnnnnnnnnnnnnnnnnnnnnnnnnnnnnnnnnnnnnnnnnnnnnnnnnnnnnnnnnnnnnnnnnnnnnnnnnnnnnnnnnnnnnnnnnnnnnnnnnnnnnnnnnnnnnnnnnnnnnnnnnnnnnnnnnnnnnnnnnnnnnnnnnnnnnnnnnnnnnnnnnnnnnnnnnnnnnnnnnnnnnnnnnnnnnnnnnnnnnnnnnnnnnnnnnnnnnnnnnnnnnnnnnnnnnnnnnnnnnnnnnnnnnnnnnnnnnnnnnnnnnnnnnnnnnnnnnnnnnnnnnnnnnnnnnnnnnnnnnnnnnnnnnnnnnnnnnnnnnnnnnnnnnnnnnnnnnnnnnnnnnnnnnnnnnnnnnnnnnnnnnnnnnnnnnnnnnnnnnnnnnnnnnnnnnnnnnnnnnnnnnnnnnnnnnnnnnnnnnnnnnnnnnnnnnnnnnnnnnnnnnnnnnnnnnnnnnnnnnnnnnnnnnnnnnnnnnnnnnnnnnnnnnnnnnnnnnnnnnnnnnnnnnnnnnnnnnnnnnnnnnnnnnnnnnnnnnnnnnnnnnnnnnnnnnnnnnnnnnnnnnnnnnnnnnnnnnnnnnnnnnnnnnnnnnnnnnnnnnnnnnnnnnnnnnnnnnnnnnnnnnnnnnnnnnnnnnnnnnnnnnnnnnnnnnnnnnnnnnnnnnnnnnnnnnnnnnnnnnnnnnnnnnnnnnnnnnnnnnnnnnnnnnnnnnnnnnnnnnnnnnnnnnnnnnnnnnnnnnnnnnnnnnnnnnnnnnnnnnnnnnnnnnnnnnnnnnnnnnnnnnnnnnnnnnnnnnnnnnnnnnnnnnnnnnnnnnnnnnnnnnnnnnnnnnnnnnnnnnnnnnnnnnnnnnnnnnnnnnnnnnnnnnnnnnnnnnnnnnnnnnnnnnnnnnnnnnnnnnnnnnnnnnnnnnnnnnnnnnnnnnnnnnnnnnnnnnnnnnnnnnnnnnnnnnnnnnnnnnnnnnnnnnnnnnnnnnnnnnnnnnnnnnnnnnnnnnnnnnnnnnnnnnnnnnnnnnnnnnnnnnnnnnnnnnnnnnnnnnnnnnnnnnnnnnnnnnnnnnnnnnnnnnnnnnnnnnnnnnnnnnnnnnnnnnnnnnnnnnnnnnnnnnnnnnnnnnnnnnnnnnnnnnnnnnnnnnnnnnnnnnnnnnnnnnnnnnnnnnnnnnnnnnnnnnnnnnnnnnnnnnnnnnnnnnnnnnnnnnnnnnnnnnnnnnnnnnnnnnnnnnnnnnnnnnnnnnnnnnnnnnnnnnnnnnnnnnnnnnnnnnnnnnnnnnnnnnnnnnnnnnnnnnnnnnnnnnnnnnnnnnnnnnnnnnnnnnnnnnnnnnnnnnnnnnnnnnnnnnnnnnnnnnnnnnnnnnnnnnnnnnnnnnnnnnnnnnnnnnnnnnnnnnnnnnnnnnnnnnnnnnnnnnnnnnnnnnnnnnnnnnnnnnnnnnnnnnnnnnnnnnnnnnnnnnnnnnnnnnnnnnnnnnnnnnnnnnnnnnnnnnnnnnnnnnnnnnnnnnnnnnnnnnnnnnnnnnnnnnnnnnnnnnnnnnnnnnnnnnnnnnnnnnnnnnnnnnnnnnnnnnnnnnnnnnnnnnnnnnnnnnnnnnnnnnnnnnnnnnnnnnnnnnnnnnnnnnnnnnnnnnnnnnnnnnnnnnnnnnnnnnnnnnnnnnnnnnnnnnnnnnnnnnnnnnnnnnnnnnnnnnnnnnnnnnnnnnnnnnnnnnnnnnnnnnnnnnnnnnnnnnnnnnnnnnnnnnnnnnnnnnnnnnnnnnnnnnnnnnnnnnnnnnnnnnnnnnnnnnnnnnnnnnnnnnnnnnnnnnnnnnnnnnnnnnnnnnnnnnnnnnnnnnnnnnnnnnnnnnnnnnnnnnnnnnnnnnnnnnnnnnnnnnnnnnnnnnnnnnnnnnnnnnnnnnnnnnnnnnnnnnnnnnnnnnnnnnnnnnnnnnnnnnnnnnnnnnnnnnnnnnnnnnnnnnnnnnnnnnnnnnnnnnnnnnnnnnnnnnnnnnnnnnnnnnnnnnnnnnnnnnnnnnnnnnnnnnnnnnnnnnnnnnnnnnnnnnnnnnnnnnnnnnnnnnnnnnnnnnnnnnnnnnnnnnnnnnnnnnnnnnnnnnnnnnnnnnnnnnnnnnnnnnnnnnnnnnnnnnnnnnnnnnnnnnnnnnnnnnnnnnnnnnnnnnnnnnnnnnnnnnnnnnnnnnnnnnnnnnnnnnnnnnnnnnnnnnnnnnnnnnnnnnnnnnnnnnnnnnnnnnnnnnnnnnnnnnnnnnnnnnnnnnnnnnnnnnnnnnnnnnnnnnnnnnnnnnnnnnnnnnnnnnnnnnnnnnnnnnnnnnnnnnnnnnnnnnnnnnnnnnnnnnnnnnnnnnnnnnnnnnnnnnnnnnnnnnnnnnnnnnnnnnnnnnnnnnnnnnnnnnnnnnnnnnnnnnnnnnnnnnnnnnnnnnnnnnnnnnnnnnnnnnnnnnnnnnnnnnnnnnnnnnnnnnnnnnnnnnnnnnnnnnnnnnnnnnnnnnnnnnnnnnnnnnnnnnnnnnnnnnnnnnnnnnnnnnnnnnnnnnnnnnnnnnnnnnnnnnnnnnnnnnnnnnnnnnnnnnnnnnnnnnnnnnnnnnnnnnnnnnnnnnnnnnnnnnnnnnnnnnnnnnnnnnnnnnnnnnnnnnnnnnnnnnnnnnnnnnnnnnnnnnnnnnnnnnnnnnnnnnnnnnnnnnnnnnnnnnnnnnnnnnnnnnnnnnnnnnnnnnnnnnnnnnnnnnnnnnnnnnnnnnnnnnnnnnnnnnnnnnnnnnnnnnnnnnnnnnnnnnnnnnnnnnnnnnnnnnnnnnnnnnnnnnnnnnnnnnnnnnnnnnnnnnnnnnnnnnnnnnnnnnnnnnnnnnnnnnnnnnnnnnnnnnnnnnnnnnnnnnnnnnnnnnnnnnnnnnnnnnnnnnnnnnnnnnnnnnnnnnnnnnnnnnnnnnnnnnnnnnnnnnnnnnnnnnnnnnnnnnnnnnnnnnnnnnnnnnnnnnnnnnnnnnnnnnnnnnnnnnnnnnnnnnnnnnnnnnnnnnnnnnnnnnnnnnnnnnnnnnnnnnnnnnnnnnnnnnnnnnnnnnnnnnnnnnnnnnnnnnnnnnnnnnnnnnnnnnnnnnnnnnnnnnnnnnnnnnnnnnnnnnnnnnnnnnnnnnnnnnnnnnnnnnnnnnnnnnnnnnnnnnnnnnnnnnnnnnnnnnnnnnnnnnnnnnnnnnnnnnnnnnnnnnnnnnnnnnnnnnnnnnnnnnnnnnnnnnnnnnnnnnnnnnnnnnnnnnnnnnnnnnnnnnnnnnnnnnnnnnnnnnnnnnnnnnnnnnnnnnnnnnnnnnnnnnnnnnnnnnnnnnnnnnnnnnnnnnnnnnnnnnnnnnnnnnnnnnnnnnnnnnnnnnnnnnnnnnnnnnnnnnnnnnnnnnnnnnnnnnnnnnnnnnnnnnnnnnnnnnnnnnnnnnnnnnnnnnnnnnnnnnnnnnnnnnnnnnnnnnnnnnnnnnnnnnnnnnnnnnnnnnnnnnnnnnnnnnnnnnnnnnnnnnnnnnnnnnnnnnnnnnnnnnnnnnnnnnnnnnnnnnnnnnnnnnnnnnnnnnnnnnnnnnnnnnnnnnnnnnnnnnnnnnnnnnnnnnnnnnnnnnnnnnnnnnnnnnnnnnnnnnnnnnnnnnnnnnnnnnnnnnnnnnnnnnnnnnnnnnnnnnnnnnnnnnnnnnnnnnnnnnnnnnnnnnnnnnnnnnnnnnnnnnnnnnnnnnnnnnnnnnnnnnnnnnnnnnnnnnnnnnnnnnnnnnnnnnnnnnnnnnnnnnnnnnnnnnnnnnnnnnnnnnnnnnnnnnnnnnnnnnnnnnnnnnnnnnnnnnnnnnnnnnnnnnnnnnnnnnnnnnnnnnnnnnnnnnnnnnnnnnnnnnnnnnnnnnnnnnnnnnnnnnnnnnnnnnnnnnnnnnnnnnnnnnnnnnnnnnnnnnnnnnnnnnnnnnnnnnnnnnnnnnnnnnnnnnnnnnnnnnnnnnnnnnnnnnnnnnnnnnnnnnnnnnnnnnnnnnnnnnnnnnnnnnnnnnnnnnnnnnnnnnnnnnnnnnnnnnnnnnnnnnnnnnnnnnnnnnnnnnnnnnnnnnnnnnnnnnnnnnnnnnnnnnnnnnnnnnnnnnnnnnnnnnnnnnnnnnnnnnnnnnnnnnnnnnnnnnnnnnnnnnnnnnnnnnnnnnnnnnnnnnnnnnnnnnnnnnnnnnnnnnnnnnnnnnnnnnnnnnnnnnnnnnnnnnnnnnnnnnnnnnnnnnnnnnnnnnnnnnnnnnnnnnnnnnnnnnnnnnnnnnnnnnnnnnnnnnnnnnnnnnnnnnnnnnnnnnnnnnnnnnnnnnnnnnnnnnnnnnnnnnnnnnnnnnnnnnnnnnnnnnnnnnnnnnnnnnnnnnnnnnnnnnnnnnnnnnnnnnnnnnnnnnnnnnnnnnnnnnnnnnnnnnnnnnnnnnnnnnnnnnnnnnnnnnnnnnnnnnnnnnnnnnnnnnnnnnnnnnnnnnnnnnnnnnnnnnnnnnnnnnnnnnnnnnnnnnnnnnnnnnnnnnnnnnnnnnnnnnnnnnnnnnnnnnnnnnnnnnnnnnnnnnnnnnnnnnnnnnnnnnnnnnnnnnnnnnnnnnnnnnnnnnnnnnnnnnnnnnnnnnnnnnnnnnnnnnnnnnnnnnnnnnnnnnnnnnnnnnnnnnnnnnnnnnnnnnnnnnnnnnnnnnnnnnnnnnnnnnnnnnnnnnnnnnnnnnnnnnnnnnnnnnnnnnnnnnnnnnnnnnnnnnnnnnnnnnnnnnnnnnnnnnnnnnnnnnnnnnnnnnnnnnnnnnnnnnnnnnnnnnnnnnnnnnnnnnnnnnnnnnnnnnnnnnnnnnnnnnnnnnnnnnnnnnnnnnnnnnnnnnnnnnnnnnnnnnnnnnnnnnnnnnnnnnnnnnnnnnnnnnnnnnnnnnnnnnnnnnnnnnnnnnnnnnnnnnnnnnnnnnnnnnnnnnnnnnnnnnnnnnnnnnnnnnnnnnnnnnnnnnnnnnnnnnnnnnnnnnnnnnnnnnnnnnnnnnnnnnnnnnnnnnnnnnnnnnnnnnnnnnnnnnnnnnnnnnnnnnnnnnnnnnnnnnnnnnnnnnnnnnnnnnnnnnnnnnnnnnnnnnnnnnnnnnnnnnnnnnnnnnnnnnnnnnnnnnnnnnnnnnnnnnnnnnnnnnnnnnnnnnnnnnnnnnnnnnnnnnnnnnnnnnnnnnnnnnnnnnnnnnnnnnnnnnnnnnnnnnnnnnnnnnnnnnnnnnnnnnnnnnnnnnnnnnnnnnnnnnnnnnnnnnnnnnnnnnnnnnnnnnnnnnnnnnnnnnnnnnnnnnnnnnnnnnnnnnnnnnnnnnnnnnnnnnnnnnnnnnnnnnnnnnnnnnnnnnnnnnnnnnnnnnnnnnnnnnnnnnnnnnnnnnnnnnnnnnnnnnnnnnnnnnnnnnnnnnnnnnnnnnnnnnnnnnnnnnnnnnnnnnnnnnnnnnnnnnnnnnnnnnnnnnnnnnnnnnnnnnnnnnnnnnnnnnnnnnnnnnnnnnnnnnnnnnnnnnnnnnnnnnnnnnnnnnnnnnnnnnnnnnnnnnnnnnnnnnnnnnnnnnnnnnnnnnnnnnnnnnnnnnnnnnnnnnnnnnnnnnnnnnnnnnnnnnnnnnnnnnnnnnnnnnnnnnnnnnnnnnnnnnnnnnnnnnnnnnnnnnnnnnnnnnnnnnnnnnnnnnnnnnnnnnnnnnnnnnnnnnnnnnnnnnnnnnnnnnnnnnnnnnnnnnnnnnnnnnnnnnnnnnnnnnnnnnnnnnnnnnnnnnnnnnnnnnnnnnnnnnnnnnnnnnnnnnnnnnnnnnnnnnnnnnnnnnnnnnnnnnnnnnnnnnnnnnnnnnnnnnnnnnnnnnnnnnnnnnnnnnnnnnnnnnnnnnnnnnnnnnnnnnnnnnnnnnnnnnnnnnnnnnnnnnnnnnnnnnnnnnnnnnnnnnnnnnnnnnnnnnnnnnnnnnnnnnnnnnnnnnnnnnnnnnnnnnnnnnnnnnnnnnnnnnnnnnnnnnnnnnnnnnnnnnnnnnnnnnnnnnnnnnnnnnnnnnnnnnnnnnnnnnnnnnnnnnnnnnnnnnnnnnnnnnnnnnnnnnnnnnnnnnnnnnnnnnnnnnnnnnnnnnnnnnnnnnnnnnnnnnnnnnnnnnnnnnnnnnnnnnnnnnnnnnnnnnnnnnnnnnnnnnnnnnnnnnnnnnnnnnnnnnnnnnnnnnnnnnnnnnnnnnnnnnnnnnnnnnnnnnnnnnnnnnnnnnnnnnnnnnnnnnnnnnnnnnnnnnnnnnnnnnnnnnnnnnnnnnnnnnnnnnnnnnnnnnnnnnnnnnnnnnnnnnnnnnnnnnnnnnnnnnnnnnnnnnnnnnnnnnnnnnnnnnnnnnnnnnnnnnnnnnnnnnnnnnnnnnnnnnnnnnnnnnnnnnnnnnnnnnnnnnnnnnnnnnnnnnnnnnnnnnnnnnnnnnnnnnnnnnnnnnnnnnnnnnnnnnnnnnnnnnnnnnnnnnnnnnnnnnnnnnnnnnnnnnnnnnnnnnnnnnnnnnnnnnnnnnnnnnnnnnnnnnnnnnnnnnnnnnnnnnnnnnnnnnnnnnnnnnnnnnnnnnnnnnnnnnnnnnnnnnnnnnnnnnnnnnnnnnnnnnnnnnnnnnnnnnnnnnnnnnnnnnnnnnnnnnnnnnnnnnnnnnnnnnnnnnnnnnnnnnnnnnnnnnnnnnnnnnnnnnnnnnnnnnnnnnnnnnnnnnnnnnnnnnnnnnnnnnnnnnnnnnnnnnnnnnnnnnnnnnnnnnnnnnnnnnnnnnnnnnnnnnnnnnnnnnnnnnnnnnnnnnnnnnnnnnnnnnnnnnnnnnnnnnnnnnnnnnnnnnnnnnnnnnnnnnnnnnnnnnnnnnnnnnnnnnnnnnnnnnnnnnnnnnnnnnnnnnnnnnnnnnnnnnnnnnnnnnnnnnnnnnnnnnnnnnnnnnnnnnnnnnnnnnnnnnnnnnnnnnnnnnnnnnnnnnnnnnnnnnnnnnnnnnnnnnnnnnnnnnnnnnnnnnnnnnnnnnnnnnnnnnnnnnnnnnnnnnnnnnnnnnnnnnnnnnnnnnnnnnnnnnnnnnnnnnnnnnnnnnnnnnnnnnnnnnnnnnnnnnnnnnnnnnnnnnnnnnnnnnnnnnnnnnnnnnnnnnnnnnnnnnnnnnnnnnnnnnnnnnnnnnnnnnnnnnnnnnnnnnnnnnnnnnnnnnnnnnnnnnnnnnnnnnnnnnnnnnnnnnnnnnnnnnnnnnnnnnnnnnnnnnnnnnnnnnnnnnnnnnnnnnnnnnnnnnnnnnnnnnnnnnnnnnnnnnnnnnnnnnnnnnnnnnnnnnnnnnnnnnnnnnnnnnnnnnnnnnnnnnnnnnnnnnnnnnnnnnnnnnnnnnnnnnnnnnnnnnnnnnnnnnnnnnnnnnnnnnnnnnnnnnnnnnnnnnnnnnnnnnnnnnnnnnnnnnnnnnnnnnnnnnnnnnnnnnnnnnnnnnnnnnnnnnnnnnnnnnnnnnnnnnnnnnnnnnnnnnnnnnnnnnnnnnnnnnnnnnnnnnnnnnnnnnnnnnnnnnnnnnnnnnnnnnnnnnnnnnnnnnnnnnnnnnnnnnnnnnnnnnnnnnnnnnnnnnnnnnnnnnnnnnnnnnnnnnnnnnnnnnnnnnnnnnnnnnnnnnnnnnnnnnnnnnnnnnnnnnnnnnnnnnnnnnnnnnnnnnnnnnnnnnnnnnnnnnnnnnnnnnnnnnnnnnnnnnnnnnnnnnnnnnnnnnnnnnnnnnnnnnnnnnnnnnnnnnnnnnnnnnnnnnnnnnnnnnnnnnnnnnnnnnnnnnnnnnnnnnnnnnnnnnnnnnnnnnnnnnnnnnnnnnnnnnnnnnnnnnnnnnnnnnnnnnnnnnnnnnnnnnnnnnnnnnnnnnnnnnnnnnnnnnnnnnnnnnnnnnnnnnnnnnnnnnnnnnnnnnnnnnnnnnnnnnnnnnnnnnnnnnnnnnnnnnnnnnnnnnnnnnnnnnnnnnnnnnnnnnnnnnnnnnnnnnnnnnnnnnnnnnnnnnnnnnnnnnnnnnnnnnnnnnnnnnnnnnnnnnnnnnnnnnnnnnnnnnnnnnnnnnnnnnnnnnnnnnnnnnnnnnnnnnnnnnnnnnnnnnnnnnnnnnnnnnnnnnnnnnnnnnnnnnnnnnnnnnnnnnnnnnnnnnnnnnnnnnnnnnnnnnnnnnnnnnnnnnnnnnnnnnnnnnnnnnnnnnnnnnnnnnnnnnnnnnnnnnnnnnnnnnnnnnnnnnnnnnnnnnnnnnnnnnnnnnnnnnnnnnnnnnnnnnnnnnnnnnnnnnnnnnnnnnnnnnnnnnnnnnnnnnnnnnnnnnnnnnnnnnnnnnnnnnnnnnnnnnnnnnnnnnnnnnnnnnnnnnnnnnnnnnnnnnnnnnnnnnnnnnnnnnnnnnnnnnnnnnnnnnnnnnnnnnnnnnnnnnnnnnnnnnnnnnnnnnnnnnnnnnnnnnnnnnnnnnnnnnnnnnnnnnnnnnnnnnnnnnnnnnnnnnnnnnnnnnnnnnnnnnnnnnnnnnnnnnnnnnnnnnnnnnnnnnnnnnnnnnnnnnnnnnnnnnnnnnnnnnnnnnnnnnnnnnnnnnnnnnnnnnnnnnnnnnnnnnnnnnnnnnnnnnnnnnnnnnnnnnnnnnnnnnnnnnnnnnnnnnnnnnnnnnnnnnnnnnnnnnnnnnnnnnnnnnnnnnnnnnnnnnnnnnnnnnnnnnnnnnnnnnnnnnnnnnnnnnnnnnnnnnnnnnnnnnnnnnnnnnnnnnnnnnnnnnnnnnnnnnnnnnnnnnnnnnnnnnnnnnnnnnnnnnnnnnnnnnnnnnnnnnnnnnnnnnnnnnnnnnnnnnnnnnnnnnnnnnnnnnnnnnnnnnnnnnnnnnnnnnnnnnnnnnnnnnnnnnnnnnnnnnnnnnnnnnnnnnnnnnnnnnnnnnnnnnnnnnnnnnnnnnnnnnnnnnnnnnnnnnnnnnnnnnnnnnnnnnnnnnnnnnnnnnnnnnnnnnnnnnnnnnnnnnnnnnnnnnnnnnnnnnnnnnnnnnnnnnnnnnnnnnnnnnnnnnnnnnnnnnnnnnnnnnnnnnnnnnnnnnnnnnnnnnnnnnnnnnnnnnnnnnnnnnnnnnnnnnnnnnnnnnnnnnnnnnnnnnnnnnnnnnnnnnnnnnnnnnnnnnnnnnnnnnnnnnnnnnnnnnnnnnnnnnnnnnnnnnnnnnnnnnnnnnnnnnnnnnnnnnnnnnnnnnnnnnnnnnnnnnnnnnnnnnnnnnnnnnnnnnnnnnnnnnnnnnnnnnnnnnnnnnnnnnnnnnnnnnnnnnnnnnnnnnnnnnnnnnnnnnnnnnnnnnnnnnnnnnnnnnnnnnnnnnnnnnnnnnnnnnnnnnnnnnnnnnnnnnnnnnnnnnnnnnnnnnnnnnnnnnnnnnnnnnnnnnnnnnnnnnnnnnnnnnnnnnnnnnnnnnnnnnnnnnnnnnnnnnnnnnnnnnnnnnnnnnnnnnnnnnnnnnnnnnnnnnnnnnnnnnnnnnnnnnnnnnnnnnnnnnnnnnnnnnnnnnnnnnnnnnnnnnnnnnnnnnnnnnnnnnnnnnnnnnnnnnnnnnnnnnnnnnnnnnnnnnnnnnnnnnnnnnnnnnnnnnnnnnnnnnnnnnnnnnnnnnnnnnnnnnnnnnnnnnnnnnnnnnnnnnnnnnnnnnnnnnnnnnnnnnnnnnnnnnnnnnnnnnnnnnnnnnnnnnnnnnnnnnnnnnnnnnnnnnnnnnnnnnnnnnnnnnnnnnnnnnnnnnnnnnnnnnnnnnnnnnnnnnnnnnnnnnnnnnnnnnnnnnnnnnnnnnnnnnnnnnnnnnnnnnnnnnnnnnnnnnnnnnnnnnnnnnnnnnnnnnnnnnnnnnnnnnnnnnnnnnnnnnnnnnnnnnnnnnnnnnnnnnnnnnnnnnnnnnnnnnnnnnnnnnnnnnnnnnnnnnnnnnnnnnnnnnnnnnnnnnnnnnnnnnnnnnnnnnnnnnnnnnnnnnnnnnnnnnnnnnnnnnnnnnnnnnnnnnnnnnnnnnnnnnnnnnnnnnnnnnnnnnnnnnnnnnnnnnnnnnnnnnnnnnnnnnnnnnnnnnnnnnnnnnnnnnnnnnnnnnnnnnnnnnnnnnnnnnnnnnnnnnnnnnnnnnnnnnnnnnnnnnnnnnnnnnnnnnnnnnnnnnnnnnnnnnnnnnnnnnnnnnnnnnnnnnnnnnnnnnnnnnnnnnnnnnnnnnnnnnnnnnnnnnnnnnnnnnnnnnnnnnnnnnnnnnnnnnnnnnnnnnnnnnnnnnnnnnnnnnnnnnnnnnnnnnnnnnnnnnnnnnnnnnnnnnnnnnnnnnnnnnnnnnnnnnnnnnnnnnnnnnnnnnnnnnnnnnnnnnnnnnnnnnnnnnnnnnnnnnnnnnnnnnnnnnnnnnnnnnnnnnnnnnnnnnnnnnnnnnnnnnnnnnnnnnnnnnnnnnnnnnnnnnnnnnnnnnnnnnnnnnnnnnnnnnnnnnnnnnnnnnnnnnnnnnnnnnnnnnnnnnnnnnnnnnnnnnnnnnnnnnnnnnnnnnnnnnnnnnnnnnnnnnnnnnnnnnnnnnnnnnnnnnnnnnnnnnnnnnnnnnnnnnnnnnnnnnnnnnnnnnnnnnnnnnnnnnnnnnnnnnnnnnnnnnnnnnnnnnnnnnnnnnnnnnnnnnnnnnnnnnnnnnnnnnnnnnnnnnnnnnnnnnnnnnnnnnnnnnnnnnnnnnnnnnnnnnnnnnnnnnnnnnnnnnnnnnnnnnnnnnnnnnnnnnnnnnnnnnnnnnnnnnnnnnnnnnnnnnnnnnnnnnnnnnnnnnnnnnnnnnnnnnnnnnnnnnnnnnnnnnnnnnnnnnnnnnnnnnnnnnnnnnnnnnnnnnnnnnnnnnnnnnnnnnnnnnnnnnnnnnnnnnnnnnnnnnnnnnnnnnnnnnnnnnnnnnnnnnnnnnnnnnnnnnnnnnnnnnnnnnnnnnnnnnnnnnnnnnnnnnnnnnnnnnnnnnnnnnnnnnnnnnnnnnnnnnnnnnnnnnnnnnnnnnnnnnnnnnnnnnnnnnnnnnnnnnnnnnnnnnnnnnnnnnnnnnnnnnnnnnnnnnnnnnnnnnnnnnnnnnnnnnnnnnnnnnnnnnnnnnnnnnnnnnnnnnnnnnnnnnnnnnnnnnnnnnnnnnnnnnnnnnnnnnnnnnnnnnnnnnnnnnnnnnnnnnnnnnnnnnnnnnnnnnnnnnnnnnnnnnnnnnnnnnnnnnnnnnnnnnnnnnnnnnnnnnnnnnnnnnnnnnnnnnnnnnnnnnnnnnnnnnnnnnnnnnnnnnnnnnnnnnnnnnnnnnnnnnnnnnnnnnnnnnnnnnnnnnnnnnnnnnnnnnnnnnnnnnnnnnnnnnnnnnnnnnnnnnnnnnnnnnnnnnnnnnnnnnnnnnnnnnnnnnnnnnnnnnnnnnnnnnnnnnnnnnnnnnnnnnnnnnnnnnnnnnnnnnnnnnnnnnnnnnnnnnnnnnnnnnnnnnnnnnnnnnnnnnnnnnnnnnnnnnnnnnnnnnnnnnnnnnnnnnnnnnnnnnnnnnnnnnnnnnnnnnnnnnnnnnnnnnnnnnnnnnnnnnnnnnnnnnnnnnnnnnnnnnnnnnnnnnnnnnnnnnnnnnnnnnnnnnnnnnnnnnnnnnnnnnnnnnnnnnnnnnnnnnnnnnnnnnnnnnnnnnnnnnnnnnnnnnnnnnnnnnnnnnnnnnnnnnnnnnnnnnnnnnnnnnnnnnnnnnnnnnnnnnnnnnnnnnnnnnnnnnnnnnnnnnnnnnnnnnnnnnnnnnnnnnnnnnnnnnnnnnnnnnnnnnnnnnnnnnnnnnnnnnnnnnnnnnnnnnnnnnnnnnnnnnnnnnnnnnnnnnnnnnnnnnnnnnnnnnnnnnnnnnnnnnnnnnnnnnnnnnnnnnnnnnnnnnnnnnnnnnnnnnnnnnnnnnnnnnnnnnnnnnnnnnnnnnnnnnnnnnnnnnnnnnnnnnnnnnnnnnnnnnnnnnnnnnnnnnnnnnnnnnnnnnnnnnnnnnnnnnnnnnnnnnnnnnnnnnnnnnnnnnnnnnnnnnnnnnnnnnnnnnnnnnnnnnnnnnnnnnnnnnnnnnnnnnnnnnnnnnnnnnnnnnnnnnnnnnnnnnnnnnnnnnnnnnnnnnnnnnnnnnnnnnnnnnnnnnnnnnnnnnnnnnnnnnnnnnnnnnnnnnnnnnnnnnnnnnnnnnnnnnnnnnnnnnnnnnnnnnnnnnnnnnnnnnnnnnnnnnnnnnnnnnnnnnnnnnnnnnnnnnnnnnnnnnnnnnnnnnnnnnnnnnnnnnnnnnnnnnnnnnnnnnnnnnnnnnnnnnnnnnnnnnnnnnnnnnnnnnnnnnnnnnnnnnnnnnnnnnnnnnnnnnnnnnnnnnnnnnnnnnnnnnnnnnnnnnnnnnnnnnnnnnnnnnnnnnnnnnnnnnnnnnnnnnnnnnnnnnnnnnnnnnnnnnnnnnnnnnnnnnnnnnnnnnnnnnnnnnnnnnnnnnnnnnnnnnnnnnnnnnnnnnnnnnnnnnnnnnnnnnnnnnnnnnnnnnnnnnnnnnnnnnnnnnnnnnnnnnnnnnnnnnnnnnnnnnnnnnnnnnnnnnnnnnnnnnnnnnnnnnnnnnnnnnnnnnnnnnnnnnnnnnnnnnnnnnnnnnnnnnnnnnnnnnnnnnnnnnnnnnnnnnnnnnnnnnnnnnnnnnnnnnnnnnnnnnnnnnnnnnnnnnnnnnnnnnnnnnnnnnnnnnnnnnnnnnnnnnnnnnnnnnnnnnnnnnnnnnnnnnnnnnnnnnnnnnnnnnnnnnnnnnnnnnnnnnnnnnnnnnnnnnnnnnnnnnnnnnnnnnnnnnnnnnnnnnnnnnnnnnnnnnnnnnnnnnnnnnnnnnnnnnnnnnnnnnnnnnnnnnnnnnnnnnnnnnnnnnnnnnnnnnnnnnnnnnnnnnnnnnnnnnnnnnnnnnnnnnnnnnnnnnnnnnnnnnnnnnnnnnnnnnnnnnnnnnnnnnnnnnnnnnnnnnnnnnnnnnnnnnnnnnnnnnnnnnnnnnnnnnnnnnnnnnnnnnnnnnnnnnnnnnnnnnnnnnnnnnnnnnnnnnnnnnnnnnnnnnnnnnnnnnnnnnnnnnnnnnnnnnnnnnnnnnnnnnnnnnnnnnnnnnnnnnnnnnnnnnnnnnnnnnnnnnnnnnnnnnnnnnnnnnnnnnnnnnnnnnnnnnnnnnnnnnnnnnnnnnnnnnnnnnnnnnnnnnnnnnnnnnnnnnnnnnnnnnnnnnnnnnnnnnnnnnnnnnnnnnnnnnnnnnnnnnnnnnnnnnnnnnnnnnnnnnnnnnnnnnnnnnnnnnnnnnnnnnnnnnnnnnnnnnnnnnnnnnnnnnnnnnnnnnnnnnnnnnnnnnnnnnnnnnnnnnnnnnnnnnnnnnnnnnnnnnnnnnnnnnnnnnnnnnnnnnnnnnnnnnnnnnnnnnnnnnnnnnnnnnnnnnnnnnnnnnnnnnnnnnnnnnnnnnnnnnnnnnnnnnnnnnnnnnnnnnnnnnnnnnnnnnnnnnnnnnnnnnnnnnnnnnnnnnnnnnnnnnnnnnnnnnnnnnnnnnnnnnnnnnnnnnnnnnnnnnnnnnnnnnnnnnnnnnnnnnnnnnnnnnnnnnnnnnnnnnnnnnnnnnnnnnnnnnnnnnnnnnnnnnnnnnnnnnnnnnnnnnnnnnnnnnnnnnnnnnnnnnnnnnnnnnnnnnnnnnnnnnnnnnnnnnnnnnnnnnnnnnnnnnnnnnnnnnnnnnnnnnnnnnnnnnnnnnnnnnnnnnnnnnnnnnnnnnnnnnnnnnnnnnnnnnnnnnnnnnnnnnnnnnnnnnnnnnnnnnnnnnnnnnnnnnnnnnnnnnnnnnnnnnnnnnnnnnnnnnnnnnnnnnnnnnnnnnnnnnnnnnnnnnnnnnnnnnnnnnnnnnnnnnnnnnnnnnnnnnnnnnnnnnnnnnnnnnnnnnnnnnnnnnnnnnnnnnnnnnnnnnnnnnnnnnnnnnnnnnnnnnnnnnnnnnnnnnnnnnnnnnnnnnnnnnnnnnnnnnnnnnnnnnnnnnnnnnnnnnnnnnnnnnnnnnnnnnnnnnnnnnnnnnnnnnnnnnnnnnnnnnnnnnnnnnnnnnnnnnnnnnnnnnnnnnnnnnnnnnnnnnnnnnnnnnnnnnnnnnnnnnnnnnnnnnnnnnnnnnnnnnnnnnnnnnnnnnnnnnnnnnnnnnnnnnnnnnnnnnnnnnnnnnnnnnnnnnnnnnnnnnnnnnnnnnnnnnnnnnnnnnnnnnnnnnnnnnnnnnnnnnnnnnnnnnnnnnnnnnnnnnnnnnnnnnnnnnnnnnnnnnnnnnnnnnnnnnnnnnnnnnnnnnnnnnnnnnnnnnnnnnnnnnnnnnnnnnnnnnnnnnnnnnnnnnnnnnnnnnnnnnnnnnnnnnnnnnnnnnnnnnnnnnnnnnnnnnnnnnnnnnnnnnnnnnnnnnnnnnnnnnnnnnnnnnnnnnnnnnnnnnnnnnnnnnnnnnnnnnnnnnnnnnnnnnnnnnnnnnnnnnnnnnnnnnnnnnnnnnnnnnnnnnnnnnnnnnnnnnnnnnnnnnnnnnnnnnnnnnnnnnnnnnnnnnnnnnnnnnnnnnnnnnnnnnnnnnnnnnnnnnnnnnnnnnnnnnnnnnnnnnnnnnnnnnnnnnnnnnnnnnnnnnnnnnnnnnnnnnnnnnnnnnnnnnnnnnnnnnnnnnnnnnnnnnnnnnnnnnnnnnnnnnnnnnnnnnnnnnnnnnnnnnnnnnnnnnnnnnnnnnnnnnnnnnnnnnnnnnnnnnnnnnnnnnnnnnnnnnnnnnnnnnnnnnnnnnnnnnnnnnnnnnnnnnnnnnnnnnnnnnnnnnnnnnnnnnnnnnnnnnnnnnnnnnnnnnnnnnnnnnnnnnnnnnnnnnnnnnnnnnnnnnnnnnnnnnnnnnnnnnnnnnnnnnnnnnnnnnnnnnnnnnnnnnnnnnnnnnnnnnnnnnnnnnnnnnnnnnnnnnnnnnnnnnnnnnnnnnnnnnnnnnnnnnnnnnnnnnnnnnnnnnnnnnnnnnnnnnnnnnnnnnnnnnnnnnnnnnnnnnnnnnnnnnnnnnnnnnnnnnnnnnnnnnnnnnnnnnnnnnnnnnnnnnnnnnnnnnnnnnnnnnnnnnnnnnnnnnnnnnnnnnnnnnnnnnnnnnnnnnnnnnnnnnnnnnnnnnnnnnnnnnnnnnnnnnnnnnnnnnnnnnnnnnnnnnnnnnnnnnnnnnnnnnnnnnnnnnnnnnnnnnnnnnnnnnnnnnnnnnnnnnnnnnnnnnnnnnnnnnnnnnnnnnnnnnnnnnnnnnnnnnnnnnnnnnnnnnnnnnnnnnnnnnnnnnnnnnnnnnnnnnnnnnnnnnnnnnnnnnnnnnnnnnnnnnnnnnnnnnnnnnnnnnnnnnnnnnnnnnnnnnnnnnnnnnnnnnnnnnnnnnnnnnnnnnnnnnnnnnnnnnnnnnnnnnnnnnnnnnnnnnnnnnnnnnnnnnnnnnnnnnnnnnnnnnnnnnnnnnnnnnnnnnnnnnnnnnnnnnnnnnnnnnnnnnnnnnnnnnnnnnnnnnnnnnnnnnnnnnnnnnnnnnnnnnnnnnnnnnnnnnnnnnnnnnnnnnnnnnnnnnnnnnnnnnnnnnnnnnnnnnnnnnnnnnnnnnnnnnnnnnnnnnnnnnnnnnnnnnnnnnnnnnnnnnnnnnnnnnnnnnnnnnnnnnnnnnnnnnnnnnnnnnnnnnnnnnnnnnnnnnnnnnnnnnnnnnnnnnnnnnnnnnnnnnnnnnnnnnnnnnnnnnnnnnnnnnnnnnnnnnnnnnnnnnnnnnnnnnnnnnnnnnnnnnnnnnnnnnnnnnnnnnnnnnnnnnnnnnnnnnnnnnnnnnnnnnnnnnnnnnnnnnnnnnnnnnnnnnnnnnnnnnnnnnnnnnnnnnnnnnnnnnnnnnnnnnnnnnnnnnnnnnnnnnnnnnnnnnnnnnnnnnnnnnnnnnnnnnnnnnnnnnnnnnnnnnnnnnnnnnnnnnnnnnnnnnnnnnnnnnnnnnnnnnnnnnnnnnnnnnnnnnnnnnnnnnnnnnnnnnnnnnnnnnnnnnnnnnnnnnnnnnnnnnnnnnnnnnnnnnnnnnnnnnnnnnnnnnnnnnnnnnnnnnnnnnnnnnnnnnnnnnnnnnnnnnnnnnnnnnnnnnnnnnnnnnnnnnnnnnnnnnnnnnnnnnnnnnnnnnnnnnnnnnnnnnnnnnnnnnnnnnnnnnnnnnnnnnnnnnnnnnnnnnnnnnnnnnnnnnnnnnnnnnnnnnnnnnnnnnnnnnnnnnnnnnnnnnnnnnnnnnnnnnnnnnnnnnnnnnnnnnnnnnnnnnnnnnnnnnnnnnnnnnnnnnnnnnnnnnnnnnnnnnnnnnnnnnnnnnnnnnnnnnnnnnnnnnnnnnnnnnnnnnnnnnnnnnnnnnnnnnnnnnnnnnnnnnnnnnnnnnnnnnnnnnnnnnnnnnnnnnnnnnnnnnnnnnnnnnnnnnnnnnnnnnnnnnnnnnnnnnnnnnnnnnnnnnnnnnnnnnnnnnnnnnnnnnnnnnnnnnnnnnnnnnnnnnnnnnnnnnnnnnnnnnnnnnnnnnnnnnnnnnnnnnnnnnnnnnnnnnnnnnnnnnnnnnnnnnnnnnnnnnnnnnnnnnnnnnnnnnnnnnnnnnnnnnnnnnnnnnnnnnnnnnnnnnnnnnnnnnnnnnnnnnnnnnnnnnnnnnnnnnnnnnnnnnnnnnnnnnnnnnnnnnnnnnnnnnnnnnnnnnnnnnnnnnnnnnnnnnnnnnnnnnnnnnnnnnnnnnnnnnnnnnnnnnnnnnnnnnnnnnnnnnnnnnnnnnnnnnnnnnnnnnnnnnnnnnnnnnnnnnnnnnnnnnnnnnnnnnnnnnnnnnnnnnnnnnnnnnnnnnnnnnnnnnnnnnnnnnnnnnnnnnnnnnnnnnnnnnnnnnnnnnnnnnnnnnnnnnnnnnnnnnnnnnnnnnnnnnnnnnnnnnnnnnnnnnnnnnnnnnnnnnnnnnnnnnnnnnnnnnnnnnnnnnnnnnnnnnnnnnnnnnnnnnnnnnnnnnnnnnnnnnnnnnnnnnnnnnnnnnnnnnnnnnnnnnnnnnnnnnnnnnnnnnnnnnnnnnnnnnnnnnnnnnnnnnnnnnnnnnnnnnnnnnnnnnnnnnnnnnnnnnnnnnnnnnnnnnnnnnnnnnnnnnnnnnnnnnnnnnnnnnnnnnnnnnnnnnnnnnnnnnnnnnnnnnnnnnnnnnnnnnnnnnnnnnnnnnnnnnnnnnnnnnnnnnnnnnnnnnnnnnnnnnnnnnnnnnnnnnnnnnnnnnnnnnnnnnnnnnnnnnnnnnnnnnnnnnnnnnnnnnnnnnnnnnnnnnnnnnnnnnnnnnnnnnnnnnnnnnnnnnnnnnnnnnnnnnnnnnnnnnnnnnnnnnnnnnnnnnnnnnnnnnnnnnnnnnnnnnnnnnnnnnnnnnnnnnnnnnnnnnnnnnnnnnnnnnnnnnnnnnnnnnnnnnnnnnnnnnnnnnnnnnnnnnnnnnnnnnnnnnnnnnnnnnnnnnnnnnnnnnnnnnnnnnnnnnnnnnnnnnnnnnnnnnnnnnnnnnnnnnnnnnnnnnnnnnnnnnnnnnnnnnnnnnnnnnnnnnnnnnnnnnnnnnnnnnnnnnnnnnnnnnnnnnnnnnnnnnnnnnnnnnnnnnnnnnnnnnnnnnnnnnnnnnnnnnnnnnnnnnnnnnnnnnnnnnnnnnnnnnnnnnnnnnnnnnnnnnnnnnnnnnnnnnnnnnnnnnnnnnnnnnnnnnnnnnnnnnnnnnnnnnnnnnnnnnnnnnnnnnnnnnnnnnnnnnnnnnnnnnnnnnnnnnnnnnnnnnnnnnnnnnnnnnnnnnnnnnnnnnnnnnnnnnnnnnnnnnnnnnnnnnnnnnnnnnnnnnnnnnnnnnnnnnnnnnnnnnnnnnnnnnnnnnnnnnnnnnnnnnnnnnnnnnnnnnnnnnnnnnnnnnnnnnnnnnnnnnnnnnnnnnnnnnnnnnnnnnnnnnnnnnnnnnnnnnnnnnnnnnnnnnnnnnnnnnnnnnnnnnnnnnnnnnnnnnnnnnnnnnnnnnnnnnnnnnnnnnnnnnnnnnnnnnnnnnnnnnnnnnnnnnnnnnnnnnnnnnnnnnnnnnnnnnnnnnnnnnnnnnnnnnnnnnnnnnnnnnnnnnnnnnnnnnnnnnnnnnnnnnnnnnnnnnnnnnnnnnnnnnnnnnnnnnnnnnnnnnnnnnnnnnnnnnnnnnnnnnnnnnnnnnnnnnnnnnnnnnnnnnnnnnnnnnnnnnnnnnnnnnnnnnnnnnnnnnnnnnnnnnnnnnnnnnnnnnnnnnnnnnnnnnnnnnnnnnnnnnnnnnnnnnnnnnnnnnnnnnnnnnnnnnnnnnnnnnnnnnnnnnnnnnnnnnnnnnnnnnnnnnnnnnnnnnnnnnnnnnnnnnnnnnnnnnnnnnnnnnnnnnnnnnnnnnnnnnnnnnnnnnnnnnnnnnnnnnnnnnnnnnnnnnnnnnnnnnnnnnnnnnnnnnnnnnnnnnnnnnnnnnnnnnnnnnnnnnnnnnnnnnnnnnnnnnnnnnnnnnnnnnnnnnnnnnnnnnnnnnnnnnnnnnnnnnnnnnnnnnnnnnnnnnnnnnnnnnnnnnnnnnnnnnnnnnnnnnnnnnnnnnnnnnnnnnnnnnnnnnnnnnnnnnnnnnnnnnnnnnnnnnnnnnnnnnnnnnnnnnnnnnnnnnnnnnnnnnnnnnnnnnnnnnnnnnnnnnnnnnnnnnnnnnnnnnnnnnnnnnnnnnnnnnnnnnnnnnnnnnnnnnnnnnnnnnnnnnnnnnnnnnnnnnnnnnnnnnnnnnnnnnnnnnnnnnnnnnnnnnnnnnnnnnnnnnnnnnnnnnnnnnnnnnnnnnnnnnnnnnnnnnnnnnnnnnnnnnnnnnnnnnnnnnnnnnnnnnnnnnnnnnnnnnnnnnnnnnnnnnnnnnnnnnnnnnnnnnnnnnnnnnnnnnnnnnnnnnnnnnnnnnnnnnnnnnnnnnnnnnnnnnnnnnnnnnnnnnnnnnnnnnnnnnnnnnnnnnnnnnnnnnnnnnnnnnnnnnnnnnnnnnnnnnnnnnnnnnnnnnnnnnnnnnnnnnnnnnnnnnnnnnnnnnnnnnnnnnnnnnnnnnnnnnnnnnnnnnnnnnnnnnnnnnnnnnnnnnnnnnnnnnnnnnnnnnnnnnnnnnnnnnnnnnnnnnnnnnnnnnnnnnnnnnnnnnnnnnnnnnnnnnnnnnnnnnnnnnnnnnnnnnnnnnnnnnnnnnnnnnnnnnnnnnnnnnnnnnnnnnnnnnnnnnnnnnnnnnnnnnnnnnnnnnnnnnnnnnnnnnnnnnnnnnnnnnnnnnnnnnnnnnnnnnnnnnnnnnnnnnnnnnnnnnnnnnnnnnnnnnnnnnnnnnnnnnnnnnnnnnnnnnnnnnnnnnnnnnnnnnnnnnnnnnnnnnnnnnnnnnnnnnnnnnnnnnnnnnnnnnnnnnnnnnnnnnnnnnnnnnnnnnnnnnnnnnnnnnnnnnnnnnnnnnnnnnnnnnnnnnnnnnnnnnnnnnnnnnnnnnnnnnnnnnnnnnnnnnnnnnnnnnnnnnnnnnnnnnnnnnnnnnnnnnnnnnnnnnnnnnnnnnnnnnnnnnnnnnnnnnnnnnnnnnnnnnnnnnnnnnnnnnnnnnnnnnnnnnnnnnnnnnnnnnnnnnnnnnnnnnnnnnnnnnnnnnnnnnnnnnnnnnnnnnnnnnnnnnnnnnnnnnnnnnnnnnnnnnnnnnnnnnnnnnnnnnnnnnnnnnnnnnnnnnnnnnnnnnnnnnnnnnnnnnnnnnnnnnnnnnnnnnnnnnnnnnnnnnnnnnnnnnnnnnnnnnnnnnnnnnnnnnnnnnnnnnnnnnnnnnnnnnnnnnnnnnnnnnnnnnnnnnnnnnnnnnnnnnnnnnnnnnnnnnnnnnnnnnnnnnnnnnnnnnnnnnnnnnnnnnnnnnnnnnnnnnnnnnnnnnnnnnnnnnnnnnnnnnnnnnnnnnnnnnnnnnnnnnnnnnnnnnnnnnnnnnnnnnnnnnnnnnnnnnnnnnnnnnnnnnnnnnnnnnnnnnnnnnnnnnnnnnnnnnnnnnnnnnnnnnnnnnnnnnnnnnnnnnnnnnnnnnnnnnnnnnnnnnnnnnnnnnnnnnnnnnnnnnnnnnnnnnnnnnnnnnnnnnnnnnnnnnnnnnnnnnnnnnnnnnnnnnnnnnnnnnnnnnnnnnnnnnnnnnnnnnnnnnnnnnnnnnnnnnnnnnnnnnnnnnnnnnnnnnnnnnnnnnnnnnnnnnnnnnnnnnnnnnnnnnnnnnnnnnnnnnnnnnnnnnnnnnnnnnnnnnnnnnnnnnnnnnnnnnnnnnnnnnnnnnnnnnnnnnnnnnnnnnnnnnnnnnnnnnnnnnnnnnnnnnnnnnnnnnnnnnnnnnnnnnnnnnnnnnnnnnnnnnnnnnnnnnnnnnnnnnnnnnnnnnnnnnnnnnnnnnnnnnnnnnnnnnnnnnnnnnnnnnnnnnnnnnnnnnnnnnnnnnnnnnnnnnnnnnnnnnnnnnnnnnnnnnnnnnnnnnnnnnnnnnnnnnnnnnnnnnnnnnnnnnnnnnnnnnnnnnnnnnnnnnnnnnnnnnnnnnnnnnnnnnnnnnnnnnnnnnnnnnnnnnnnnnnnnnnnnnnnnnnnnnnnnnnnnnnnnnnnnnnnnnnnnnnnnnnnnnnnnnnnnnnnnnnnnnnnnnnnnnnnnnnnnnnnnnnnnnnnnnnnnnnnnnnnnnnnnnnnnnnnnnnnnnnnnnnnnnnnnnnnnnnnnnnnnnnnnnnnnnnnnnnnnnnnnnnnnnnnnnnnnnnnnnnnnnnnnnnnnnnnnnnnnnnnnnnnnnnnnnnnnnnnnnnnnnnnnnnnnnnnnnnnnnnnnnnnnnnnnnnnnnnnnnnnnnnnnnnnnnnnnnnnnnnnnnnnnnnnnnnnnnnnnnnnnnnnnnnnnnnnnnnnnnnnnnnnnnnnnnnnnnnnnnnnnnnnnnnnnnnnnnnnnnnnnnnnnnnnnnnnnnnnnnnnnnnnnnnnnnnnnnnnnnnnnnnnnnnnnnnnnnnnnnnnnnnnnnnnnnnnnnnnnnnnnnnnnnnnnnnnnnnnnnnnnnnnnnnnnnnnnnnnnnnnnnnnnnnnnnnnnnnnnnnnnnnnnnnnnnnnnnnnnnnnnnnnnnnnnnnnnnnnnnnnnnnnnnnnnnnnnnnnnnnnnnnnnnnnnnnnnnnnnnnnnnnnnnnnnnnnnnnnnnnnnnnnnnnnnnnnnnnnnnnnnnnnnnnnnnnnnnnnnnnnnnnnnnnnnnnnnnnnnnnnnnnnnnnnnnnnnnnnnnnnnnnnnnnnnnnnnnnnnnnnnnnnnnnnnnnnnnnnnnnnnnnnnnnnnnnnnnnnnnnnnnnnnnnnnnnnnnnnnnnnnnnnnnnnnnnnnnnnnnnnnnnnnnnnnnnnnnnnnnnnnnnnnnnnnnnnnnnnnnnnnnnnnnnnnnnnnnnnnnnnnnnnnnnnnnnnnnnnnnnnnnnnnnnnnnnnnnnnnnnnnnnnnnnnnnnnnnnnnnnnnnnnnnnnnnnnnnnnnnnnnnnnnnnnnnnnnnnnnnnnnnnnnnnnnnnnnnnnnnnnnnnnnnnnnnnnnnnnnnnnnnnnnnnnnnnnnnnnnnnnnnnnnnnnnnnnnnnnnnnnnnnnnnnnnnnnnnnnnnnnnnnnnnnnnnnnnnnnnnnnnnnnnnnnnnnnnnnnnnnnnnnnnnnnnnnnnnnnnnnnnnnnnnnnnnnnnnnnnnnnnnnnnnnnnnnnnnnnnnnnnnnnnnnnnnnnnnnnnnnnnnnnnnnnnnnnnnnnnnnnnnnnnnnnnnnnnnnnnnnnnnnnnnnnnnnnnnnnnnnnnnnnnnnnnnnnnnnnnnnnnnnnnnnnnnnnnnnnnnnnnnnnnnnnnnnnnnnnnnnnnnnnnnnnnnnnnnnnnnnnnnnnnnnnnnnnnnnnnnnnnnnnnnnnnnnnnnnnnnnnnnnnnnnnnnnnnnnnnnnnnnnnnnnnnnnnnnnnnnnnnnnnnnnnnnnnnnnnnnnnnnnnnnnnnnnnnnnnnnnnnnnnnnnnnnnnnnnnnnnnnnnnnnnnnnnnnnnnnnnnnnnnnnnnnnnnnnnnnnnnnnnnnnnnnnnnnnnnnnnnnnnnnnnnnnnnnnnnnnnnnnnnnnnnnnnnnnnnnnnnnnnnnnnnnnnnnnnnnnnnnnnnnnnnnnnnnnnnnnnnnnnnnnnnnnnnnnnnnnnnnnnnnnnnnnnnnnnnnnnnnnnnnnnnnnnnnnnnnnnnnnnnnnnnnnnnnnnnnnnnnnnnnnnnnnnnnnnnnnnnnnnnnnnnnnnnnnnnnnnnnnnnnnnnnnnnnnnnnnnnnnnnnnnnnnnnnnnnnnnnnnnnnnnnnnnnnnnnnnnnnnnnnnnnnnnnnnnnnnnnnnnnnnnnnnnnnnnnnnnnnnnnnnnnnnnnnnnnnnnnnnnnnnnnnnnnnnnnnnnnnnnnnnnnnnnnnnnnnnnnnnnnnnnnnnnnnnnnnnnnnnnnnnnnnnnnnnnnnnnnnnnnnnnnnnnnnnnnnnnnnnnnnnnnnnnnnnnnnnnnnnnnnnnnnnnnnnnnnnnnnnnnnnnnnnnnnnnnnnnnnnnnnnnnnnnnnnnnnnnnnnnnnnnnnnnnnnnnnnnnnnnnnnnnnnnnnnnnnnnnnnnnnnnnnnnnnnnnnnnnnnnnnnnnnnnnnnnnnnnnnnnnnnnnnnnnnnnnnnnnnnnnnnnnnnnnnnnnnnnnnnnnnnnnnnnnnnnnnnnnnnnnnnnnnnnnnnnnnnnnnnnnnnnnnnnnnnnnnnnnnnnnnnnnnnnnnnnnnnnnnnnnnnnnnnnnnnnnnnnnnnnnnnnnnnnnnnnnnnnnnnnnnnnnnnnnnnnnnnnnnnnnnnnnnnnnnnnnnnnnnnnnnnnnnnnnnnnnnnnnnnnnnnnnnnnnnnnnnnnnnnnnnnnnnnnnnnnnnnnnnnnnnnnnnnnnnnnnnnnnnnnnnnnnnnnnnnnnnnnnnnnnnnnnnnnnnnnnnnnnnnnnnnnnnnnnnnnnnnnnnnnnnnnnnnnnnnnnnnnnnnnnnnnnnnnnnnnnnnnnnnnnnnnnnnnnnnnnnnnnnnnnnnnnnnnnnnnnnnnnnnnnnnnnnnnnnnnnnnnnnnnnnnnnnnnnnnnnnnnnnnnnnnnnnnnnnnnnnnnnnnnnnnnnnnnnnnnnnnnnnnnnnnnnnnnnnnnnnnnnnnnnnnnnnnnnnnnnnnnnnnnnnnnnnnnnnnnnnnnnnnnnnnnnnnnnnnnnnnnnnnnnnnnnnnnnnnnnnnnnnnnnnnnnnnnnnnnnnnnnnnnnnnnnnnnnnnnnnnnnnnnnnnnnnnnnnnnnnnnnnnnnnnnnnnnnnnnnnnnnnnnnnnnnnnnnnnnnnnnnnnnnnnnnnnnnnnnnnnnnnnnnnnnnnnnnnnnnnnnnnnnnnnnnnnnnnnnnnnnnnnnnnnnnnnnnnnnnnnnnnnnnnnnnnnnnnnnnnnnnnnnnnnnnnnnnnnnnnnnnnnnnnnnnnnnnnnnnnnnnnnnnnnnnnnnnnnnnnnnnnnnnnnnnnnnnnnnnnnnnnnnnnnnnnnnnnnnnnnnnnnnnnnnnnnnnnnnnnnnnnnnnnnnnnnnnnnnnnnnnnnnnnnnnnnnnnnnnnnnnnnnnnnnnnnnnnnnnnnnnnnnnnnnnnnnnnnnnnnnnnnnnnnnnnnnnnnnnnnnnnnnnnnnnnnnnnnnnnnnnnnnnnnnnnnnnnnnnnnnnnnnnnnnnnnnnnnnnnnnnnnnnnnnnnnnnnnnnnnnnnnnnnnnnnnnnnnnnnnnnnnnnnnnnnnnnnnnnnnnnnnnnnnnnnnnnnnnnnnnnnnnnnnnnnnnnnnnnnnnnnnnnnnnnnnnnnnnnnnnnnnnnnnnnnnnnnnnnnnnnnnnnnnnnnnnnnnnnnnnnnnnnnnnnnnnnnnnnnnnnnnnnnnnnnnnnnnnnnnnnnnnnnnnnnnnnnnnnnnnnnnnnnnnnnnnnnnnnnnnnnnnnnnnnnnnnnnnnnnnnnnnnnnnnnnnnnnnnnnnnnnnnnnnnnnnnnnnnnnnnnnnnnnnnnnnnnnnnnnnnnnnnnnnnnnnnnnnnnnnnnnnnnnnnnnnnnnnnnnnnnnnnnnnnnnnnnnnnnnnnnnnnnnnnnnnnnnnnnnnnnnnnnnnnnnnnnnnnnnnnnnnnnnnnnnnnnnnnnnnnnnnnnnnnnnnnnnnnnnnnnnnnnnnnnnnnnnnnnnnnnnnnnnnnnnnnnnnnnnnnnnnnnnnnnnnnnnnnnnnnnnnnnnnnnnnnnnnnnnnnnnnnnnnnnnnnnnnnnnnnnnnnnnnnnnnnnnnnnnnnnnnnnnnnnnnnnnnnnnnnnnnnnnnnnnnnnnnnnnnnnnnnnnnnnnnnnnnnnnnnnnnnnnnnnnnnnnnnnnnnnnnnnnnnnnnnnnnnnnnnnnnnnnnnnnnnnnnnnnnnnnnnnnnnnnnnnnnnnnnnnnnnnnnnnnnnnnnnnnnnnnnnnnnnnnnnnnnnnnnnnnnnnnnnnnnnnnnnnnnnnnnnnnnnnnnnnnnnnnnnnnnnnnnnnnnnnnnnnnnnnnnnnnnnnnnnnnnnnnnnnnnnnnnnnnnnnnnnnnnnnnnnnnnnnnnnnnnnnnnnnnnnnnnnnnnnnnnnnnnnnnnnnnnnnnnnnnnnnnnnnnnnnnnnnnnnnnnnnnnnnnnnnnnnnnnnnnnnnnnnnnnnnnnnnnnnnnnnnnnnnnnnnnnnnnnnnnnnnnnnnnnnnnnnnnnnnnnnnnnnnnnnnnnnnnnnnnnnnnnnnnnnnnnnnnnnnnnnnnnnnnnnnnnnnnnnnnnnnnnnnnnnnnnnnnnnnnnnnnnnnnnnnnnnnnnnnnnnnnnnnnnnnnnnnnnnnnnnnnnnnnnnnnnnnnnnnnnnnnnnnnnnnnnnnnnnnnnnnnnnnnnnnnnnnnnnnnnnnnnnnnnnnnnnnnnnnnnnnnnnnnnnnnnnnnnnnnnnnnnnnnnnnnnnnnnnnnnnnnnnnnnnnnnnnnnnnnnnnnnnnnnnnnnnnnnnnnnnnnnnnnnnnnnnnnnnnnnnnnnnnnnnnnnnnnnnnnnnnnnnnnnnnnnnnnnnnnnnnnnnnnnnnnnnnnnnnnnnnnnnnnnnnnnnnnnnnnnnnnnnnnnnnnnnnnnnnnnnnnnnnnnnnnnnnnnnnnnnnnnnnnnnnnnnnnnnnnnnnnnnnnnnnnnnnnnnnnnnnnnnnnnnnnnnnnnnnnnnnnnnnnnnnnnnnnnnnnnnnnnnnnnnnnnnnnnnnnnnnnnnnnnnnnnnnnnnnnnnnnnnnnnnnnnnnnnnnnnnnnnnnnnnnnnnnnnnnnnnnnnnnnnnnnnnnnnnnnnnnnnnnnnnnnnnnnnnnnnnnnnnnnnnnnnnnnnnnnnnnnnnnnnnnnnnnnnnnnnnnnnnnnnnnnnnnnnnnnnnnnnnnnnnnnnnnnnnnnnnnnnnnnnnnnnnnnnnnnnnnnnnnnnnnnnnnnnnnnnnnnnnnnnnnnnnnnnnnnnnnnnnnnnnnnnnnnnnnnnnnnnnnnnnnnnnnnnnnnnnnnnnnnnnnnnnnnnnnnnnnnnnnnnnnnnnnnnnnnnnnnnnnnnnnnnnnnnnnnnnnnnnnnnnnnnnnnnnnnnnnnnnnnnnnnnnnnnnnnnnnnnnnnnnnnnnnnnnnnnnnnnnnnnnnnnnnnnnnnnnnnnnnnnnnnnnnnnnnnnnnnnnnnnnnnnnnnnnnnnnnnnnnnnnnnnnnnnnnnnnnnnnnnnnnnnnnnnnnnnnnnnnnnnnnnnnnnnnnnnnnnnnnnnnnnnnnnnnnnnnnnnnnnnnnnnnnnnnnnnnnnnnnnnnnnnnnnnnnnnnnnnnnnnnnnnnnnnnnnnnnnnnnnnnnnnnnnnnnnnnnnnnnnnnnnnnnnnnnnnnnnnnnnnnnnnnnnnnnnnnnnnnnnnnnnnnnnnnnnnnnnnnnnnnnnnnnnnnnnnnnnnnnnnnnnnnnnnnnnnnnnnnnnnnnnnnnnnnnnnnnnnnnnnnnnnnnnnnnnnnnnnnnnnnnnnnnnnnnnnnnnnnnnnnnnnnnnnnnnnnnnnnnnnnnnnnnnnnnnnnnnnnnnnnnnnnnnnnnnnnnnnnnnnnnnnnnnnnnnnnnnnnnnnnnnnnnnnnnnnnnnnnnnnnnnnnnnnnnnnnnnnnnnnnnnnnnnnnnnnnnnnnnnnnnnnnnnnnnnnnnnnnnnnnnnnnnnnnnnnnnnnnnnnnnnnnnnnnnnnnnnnnnnnnnnnnnnnnnnnnnnnnnnnnnnnnnnnnnnnnnnnnnnnnnnnnnnnnnnnnnnnnnnnnnnnnnnnnnnnnnnnnnnnnnnnnnnnnnnnnnnnnnnnnnnnnnnnnnnnnnnnnnnnnnnnnnnnnnnnnnnnnnnnnnnnnnnnnnnnnnnnnnnnnnnnnnnnnnnnnnnnnnnnnnnnnnnnnnnnnnnnnnnnnnnnnnnnnnnnnnnnnnnnnnnnnnnnnnnnnnnnnnnnnnnnnnnnnnnnnnnnnnnnnnnnnnnnnnnnnnnnnnnnnnnnnnnnnnnnnnnnnnnnnnnnnnnnnnnnnnnnnnnnnnnnnnnnnnnnnnnnnnnnnnnnnnnnnnnnnnnnnnnnnnnnnnnnnnnnnnnnnnnnnnnnnnnnnnnnnnnnnnnnnnnnnnnnnnnnnnnnnnnnnnnnnnnnnnnnnnnnnnnnnnnnnnnnnnnnnnnnnnnnnnnnnnnnnnnnnnnnnnnnnnnnnnnnnnnnnnnnnnnnnnnnnnnnnnnnnnnnnnnnnnnnnnnnnnnnnnnnnnnnnnnnnnnnnnnnnnnnnnnnnnnnnnnnnnnnnnnnnnnnnnnnnnnnnnnnnnnnnnnnnnnnnnnnnnnnnnnnnnnnnnnnnnnnnnnnnnnnnnnnnnnnnnnnnnnnnnnnnnnnnnnnnnnnnnnnnnnnnnnnnnnnnnnnnnnnnnnnnnnnnnnnnnnnnnnnnnnnnnnnnnnnnnnnnnnnnnnnnnnnnnnnnnnnnnnnnnnnnnnnnnnnnnnnnnnnnnnnnnnnnnnnnnnnnnnnnnnnnnnnnnnnnnnnnnnnnnnnnnnnnnnnnnnnnnnnnnnnnnnnnnnnnnnnnnnnnnnnnnnnnnnnnnnnnnnnnnnnnnnnnnnnnnnnnnnnnnnnnnnnnnnnnnnnnnnnnnnnnnnnnnnnnnnnnnnnnnnnnnnnnnnnnnnnnnnnnnnnnnnnnnnnnnnnnnnnnnnnnnnnnnnnnnnnnnnnnnnnnnnnnnnnnnnnnnnnnnnnnnnnnnnnnnnnnnnnnnnnnnnnnnnnnnnnnnnnnnnnnnnnnnnnnnnnnnnnnnnnnnnnnnnnnnnnnnnnnnnnnnnnnnnnnnnnnnnnnnnnnnnnnnnnnnnnnnnnnnnnnnnnnnnnnnnnnnnnnnnnnnnnnnnnnnnnnnnnnnnnnnnnnnnnnnnnnnnnnnnnnnnnnnnnnnnnnnnnnnnnnnnnnnnnnnnnnnnnnnnnnnnnnnnnnnnnnnnnnnnnnnnnnnnnnnnnnnnnnnnnnnnnnnnnnnnnnnnnnnnnnnnnnnnnnnnnnnnnnnnnnnnnnnnnnnnnnnnnnnnnnnnnnnnnnnnnnnnnnnnnnnnnnnnnnnnnnnnnnnnnnnnnnnnnnnnnnnnnnnnnnnnnnnnnnnnnnnnnnnnnnnnnnnnnnnnnnnnnnnnnnnnnnnnnnnnnnnnnnnnnnnnnnnnnnnnnnnnnnnnnnnnnnnnnnnnnnnnnnnnnnnnnnnnnnnnnnnnnnnnnnnnnnnnnnnnnnnnnnnnnnnnnnnnnnnnnnnnnnnnnnnnnnnnnnnnnnnnnnnnnnnnnnnnnnnnnnnnnnnnnnnnnnnnnnnnnnnnnnnnnnnnnnnnnnnnnnnnnnnnnnnnnnnnnnnnnnnnnnnnnnnnnnnnnnnnnnnnnnnnnnnnnnnnnnnnnnnnnnnnnnnnnnnnnnnnnnnnnnnnnnnnnnnnnnnnnnnnnnnnnnnnnnnnnnnnnnnnnnnnnnnnnnnnnnnnnnnnnnnnnnnnnnnnnnnnnnnnnnnnnnnnnnnnnnnnnnnnnnnnnnnnnnnnnnnnnnnnnnnnnnnnnnnnnnnnnnnnnnnnnnnnnnnnnnnnnnnnnnnnnnnnnnnnnnnnnnnnnnnnnnnnnnnnnnnnnnnnnnnnnnnnnnnnnnnnnnnnnnnnnnnnnnnnnnnnnnnnnnnnnnnnnnnnnnnnnnnnnnnnnnnnnnnnnnnnnnnnnnnnnnnnnnnnnnnnnnnnnnnnnnnnnnnnnnnnnnnnnnnnnnnnnnnnnnnnnnnnnnnnnnnnnnnnnnnnnnnnnnnnnnnnnnnnnnnnnnnnnnnnnnnnnnnnnnnnnnnnnnnnnnnnnnnnnnnnnnnnnnnnnnnnnnnnnnnnnnnnnnnnnnnnnnnnnnnnnnnnnnnnnnnnnnnnnnnnnnnnnnnnnnnnnnnnnnnnnnnnnnnnnnnnnnnnnnnnnnnnnnnnnnnnnnnnnnnnnnnnnnnnnnnnnnnnnnnnnnnnnnnnnnnnnnnnnnnnnnnnnnnnnnnnnnnnnnnnnnnnnnnnnnnnnnnnnnnnnnnnnnnnnnnnnnnnnnnnnnnnnnnnnnnnnnnnnnnnnnnnnnnnnnnnnnnnnnnnnnnnnnnnnnnnnnnnnnnnnnnnnnnnnnnnnnnnnnnnnnnnnnnnnnnnnnnnnnnnnnnnnnnnnnnnnnnnnnnnnnnnnnnnnnnnnnnnnnnnnnnnnnnnnnnnnnnnnnnnnnnnnnnnnnnnnnnnnnnnnnnnnnnnnnnnnnnnnnnnnnnnnnnnnnnnnnnnnnnnnnnnnnnnnnnnnnnnnnnnnnnnnnnnnnnnnnnnnnnnnnnnnnnnnnnnnnnnnnnnnnnnnnnnnnnnnnnnnnnnnnnnnnnnnnnnnnnnnnnnnnnnnnnnnnnnnnnnnnnnnnnnnnnnnnnnnnnnnnnnnnnnnnnnnnnnnnnnnnnnnnnnnnnnnnnnnnnnnnnnnnnnnnnnnnnnnnnnnnnnnnnnnnnnnnnnnnnnnnnnnnnnnnnnnnnnnnnnnnnnnnnnnnnnnnnnnnnnnnnnnnnnnnnnnnnnnnnnnnnnnnnnnnnnnnnnnnnnnnnnnnnnnnnnnnnnnnnnnnnnnnnnnnnnnnnnnnnnnnnnnnnnnnnnnnnnnnnnnnnnnnnnnnnnnnnnnnnnnnnnnnnnnnnnnnnnnnnnnnnnnnnnnnnnnnnnnnnnnnnnnnnnnnnnnnnnnnnnnnnnnnnnnnnnnnnnnnnnnnnnnnnnnnnnnnnnnnnnnnnnnnnnnnnnnnnnnnnnnnnnnnnnnnnnnnnnnnnnnnnnnnnnnnnnnnnnnnnnnnnnnnnnnnnnnnnnnnnnnnnnnnnnnnnnnnnnnnnnnnnnnnnnnnnnnnnnnnnnnnnnnnnnnnnnnnnnnnnnnnnnnnnnnnnnnnnnnnnnnnnnnnnnnnnnnnnnnnnnnnnnnnnnnnnnnnnnnnnnnnnnnnnnnnnnnnnnnnnnnnnnnnnnnnnnnnnnnnnnnnnnnnnnnnnnnnnnnnnnnnnnnnnnnnnnnnnnnnnnnnnnnnnnnnnnnnnnnnnnnnnnnnnnnnnnnnnnnnnnnnnnnnnnnnnnnnnnnnnnnnnnnnnnnnnnnnnnnnnnnnnnnnnnnnnnnnnnnnnnnnnnnnnnnnnnnnnnnnnnnnnnnnnnnnnnnnnnnnnnnnnnnnnnnnnnnnnnnnnnnnnnnnnnnnnnnnnnnnnnnnnnnnnnnnnnnnnnnnnnnnnnnnnnnnnnnnnnnnnnnnnnnnnnnnnnnnnnnnnnnnnnnnnnnnnnnnnnnnnnnnnnnnnnnnnnnnnnnnnnnnnnnnnnnnnnnnnnnnnnnnnnnnnnnnnnnnnnnnnnnnnnnnnnnnnnnnnnnnnnnnnnnnnnnnnnnnnnnnnnnnnnnnnnnnnnnnnnnnnnnnnnnnnnnnnnnnnnnnnnnnnnnnnnnnnnnnnnnnnnnnnnnnnnnnnnnnnnnnnnnnnnnnnnnnnnnnnnnnnnnnnnnnnnnnnnnnnnnnnnnnnnnnnnnnnnnnnnnnnnnnnnnnnnnnnnnnnnnnnnnnnnnnnnnnnnnnnnnnnnnnnnnnnnnnnnnnnnnnnnnnnnnnnnnnnnnnnnnnnnnnnnnnnnnnnnnnnnnnnnnnnnnnnnnnnnnnnnnnnnnnnnnnnnnnnnnnnnnnnnnnnnnnnnnnnnnnnnnnnnnnnnnnnnnnnnnnnnnnnnnnnnnnnnnnnnnnnnnnnnnnnnnnnnnnnnnnnnnnnnnnnnnnnnnnnnnnnnnnnnnnnnnnnnnnnnnnnnnnnnnnnnnnnnnnnnnnnnnnnnnnnnnnnnnnnnnnnnnnnnnnnnnnnnnnnnnnnnnnnnnnnnnnnnnnnnnnnnnnnnnnnnnnnnnnnnnnnnnnnnnnnnnnnnnnnnnnnnnnnnnnnnnnnnnnnnnnnnnnnnnnnnnnnnnnnnnnnnnnnnnnnnnnnnnnnnnnnnnnnnnnnnnnnnnnnnnnnnnnnnnnnnnnnnnnnnnnnnnnnnnnnnnnnnnnnnnnnnnnnnnnnnnnnnnnnnnnnnnnnnnnnnnnnnnnnnnnnnnnnnnnnnnnnnnnnnnnnnnnnnnnnnnnnnnnnnnnnnnnnnnnnnnnnnnnnnnnnnnnnnnnnnnnnnnnnnnnnnnnnnnnnnnnnnnnnnnnnnnnnnnnnnnnnnnnnnnnnnnnnnnnnnnnnnnnnnnnnnnnnnnnnnnnnnnnnnnnnnnnnnnnnnnnnnnnnnnnnnnnnnnnnnnnnnnnnnnnnnnnnnnnnnnnnnnnnnnnnnnnnnnnnnnnnnnnnnnnnnnnnnnnnnnnnnnnnnnnnnnnnnnnnnnnnnnnnnnnnnnnnnnnnnnnnnnnnnnnnnnnnnnnnnnnnnnnnnnnnnnnnnnnnnnnnnnnnnnnnnnnnnnnnnnnnnnnnnnnnnnnnnnnnnnnnnnnnnnnnnnnnnnnnnnnnnnnnnnnnnnnnnnnnnnnnnnnnnnnnnnnnnnnnnnnnnnnnnnnnnnnnnnnnnnnnnnnnnnnnnnnnnnnnnnnnnnnnnnnnnnnnnnnnnnnnnnnnnnnnnnnnnnnnnnnnnnnnnnnnnnnnnnnnnnnnnnnnnnnnnnnnnnnnnnnnnnnnnnnnnnnnnnnnnnnnnnnnnnnnnnnnnnnnnnnnnnnnnnnnnnnnnnnnnnnnnnnnnnnnnnnnnnnnnnnnnnnnnnnnnnnnnnnnnnnnnnnnnnnnnnnnnnnnnnnnnnnnnnnnnnnnnnnnnnnnnnnnnnnnnnnnnnnnnnnnnnnnnnnnnnnnnnnnnnnnnnnnnnnnnnnnnnnnnnnnnnnnnnnnnnnnnnnnnnnnnnnnnnnnnnnnnnnnnnnnnnnnnnnnnnnnnnnnnnnnnnnnnnnnnnnnnnnnnnnnnnnnnnnnnnnnnnnnnnnnnnnnnnnnnnnnnnnnnnnnnnnnnnnnnnnnnnnnnnnnnnnnnnnnnnnnnnnnnnnnnnnnnnnnnnnnnnnnnnnnnnnnnnnnnnnnnnnnnnnnnnnnnnnnnnnnnnnnnnnnnnnnnnnnnnnnnnnnnnnnnnnnnnnnnnnnnnnnnnnnnnnnnnnnnnnnnnnnnnnnnnnnnnnnnnnnnnnnnnnnnnnnnnnnnnnnnnnnnnnnnnnnnnnnnnnnnnnnnnnnnnnnnnnnnnnnnnnnnnnnnnnnnnnnnnnnnnnnnnnnnnnnnnnnnnnnnnnnnnnnnnnnnnnnnnnnnnnnnnnnnnnnnnnnnnnnnnnnnnnnnnnnnnnnnnnnnnnnnnnnnnnnnnnnnnnnnnnnnnnnnnnnnnnnnnnnnnnnnnnnnnnnnnnnnnnnnnnnnnnnnnnnnnnnnnnnnnnnnnnnnnnnnnnnnnnnnnnnnnnnnnnnnnnnnnnnnnnnnnnnnnnnnnnnnnnnnnnnnnnnnnnnnnnnnnnnnnnnnnnnnnnnnnnnnnnnnnnnnnnnnnnnnnnnnnnnnnnnnnnnnnnnnnnnnnnnnnnnnnnnnnnnnnnnnnnnnnnnnnnnnnnnnnnnnnnnnnnnnnnnnnnnnnnnnnnnnnnnnnnnnnnnnnnnnnnnnnnnnnnnnnnnnnnnnnnnnnnnnnnnnnnnnnnnnnnnnnnnnnnnnnnnnnnnnnnnnnnnnnnnnnnnnnnnnnnnnnnnnnnnnnnnnnnnnnnnnnnnnnnnnnnnnnnnnnnnnnnnnnnnnnnnnnnnnnnnnnnnnnnnnnnnnnnnnnnnnnnnnnnnnnnnnnnnnnnnnnnnnnnnnnnnnnnnnnnnnnnnnnnnnnnnnnnnnnnnnnnnnnnnnnnnnnnnnnnnnnnnnnnnnnnnnnnnnnnnnnnnnnnnnnnnnnnnnnnnnnnnnnnnnnnnnnnnnnnnnnnnnnnnnnnnnnnnnnnnnnnnnnnnnnnnnnnnnnnnnnnnnnnnnnnnnnnnnnnnnnnnnnnnnnnnnnnnnnnnnnnnnnnnnnnnnnnnnnnnnnnnnnnnnnnnnnnnnnnnnnnnnnnnnnnnnnnnnnnnnnnnnnnnnnnnnnnnnnnnnnnnnnnnnnnnnnnnnnnnnnnnnnnnnnnnnnnnnnnnnnnnnnnnnnnnnnnnnnnnnnnnnnnnnnnnnnnnnnnnnnnnnnnnnnnnnnnnnnnnnnnnnnnnnnnnnnnnnnnnnnnnnnnnnnnnnnnnnnnnnnnnnnnnnnnnnnnnnnnnnnnnnnnnnnnnnnnnnnnnnnnnnnnnnnnnnnnnnnnnnnnnnnnnnnnnnnnnnnnnnnnnnnnnnnnnnnnnnnnnnnnnnnnnnnnnnnnnnnnnnnnnnnnnnnnnnnnnnnnnnnnnnnnnnnnnnnnnnnnnnnnnnnnnnnnnnnnnnnnnnnnnnnnnnnnnnnnnnnnnnnnnnnnnnnnnnnnnnnnnnnnnnnnnnnnnnnnnnnnnnnnnnnnnnnnnnnnnnnnnnnnnnnnnnnnnnnnnnnnnnnnnnnnnnnnnnnnnnnnnnnnnnnnnnnnnnnnnnnnnnnnnnnnnnnnnnnnnnnnnnnnnnnnnnnnnnnnnnnnnnnnnnnnnnnnnnnnnnnnnnnnnnnnnnnnnnnnnnnnnnnnnnnnnnnnnnnnnnnnnnnnnnnnnnnnnnnnnnnnnnnnnnnnnnnnnnnnnnnnnnnnnnnnnnnnnnnnnnnnnnnnnnnnnnnnnnnnnnnnnnnnnnnnnnnnnnnnnnnnnnnnnnnnnnnnnnnnnnnnnnnnnnnnnnnnnnnnnnnnnnnnnnnnnnnnnnnnnnnnnnnnnnnnnnnnnnnnnnnnnnnnnnnnnnnnnnnnnnnnnnnnnnnnnnnnnnnnnnnnnnnnnnnnnnnnnnnnnnnnnnnnnnnnnnnnnnnnnnnnnnnnnnnnnnnnnnnnnnnnnnnnnnnnnnnnnnnnnnnnnnnnnnnnnnnnnnnnnnnnnnnnnnnnnnnnnnnnnnnnnnnnnnnnnnnnnnnnnnnnnnnnnnnnnnnnnnnnnnnnnnnnnnnnnnnnnnnnnnnnnnnnnnnnnnnnnnnnnnnnnnnnnnnnnnnnnnnnnnnnnnnnnnnnnnnnnnnnnnnnnnnnnnnnnnnnnnnnnnnnnnnnnnnnnnnnnnnnnnnnnnnnnnnnnnnnnnnnnnnnnnnnnnnnnnnnnnnnnnnnnnnnnnnnnnnnnnnnnnnnnnnnnnnnnnnnnnnnnnnnnnnnnnnnnnnnnnnnnnnnnnnnnnnnnnnnnnnnnnnnnnnnnnnnnnnnnnnnnnnnnnnnnnnnnnnnnnnnnnnnnnnnnnnnnnnnnnnnnnnnnnnnnnnnnnnnnnnnnnnnnnnnnnnnnnnnnnnnnnnnnnnnnnnnnnnnnnnnnnnnnnnnnnnnnnnnnnnnnnnnnnnnnnnnnnnnnnnnnnnnnnnnnnnnnnnnnnnnnnnnnnnnnnnnnnnnnnnnnnnnnnnnnnnnnnnnnnnnnnnnnnnnnnnnnnnnnnnnnnnnnnnnnnnnnnnnnnnnnnnnnnnnnnnnnnnnnnnnnnnnnnnnnnnnnnnnnnnnnnnnnnnnnnnnnnnnnnnnnnnnnnnnnnnnnnnnnnnnnnnnnnnnnnnnnnnnnnnnnnnnnnnnnnnnnnnnnnnnnnnnnnnnnnnnnnnnnnnnnnnnnnnnnnnnnnnnnnnnnnnnnnnnnnnnnnnnnnnnnnnnnnnnnnnnnnnnnnnnnnnnnnnnnnnnnnnnnnnnnnnnnnnnnnnnnnnnnnnnnnnnnnnnnnnnnnnnnnnnnnnnnnnnnnnnnnnnnnnnnnnnnnnnnnnnnnnnnnnnnnnnnnnnnnnnnnnnnnnnnnnnnnnnnnnnnnnnnnnnnnnnnnnnnnnnnnnnnnnnnnnnnnnnnnnnnnnnnnnnnnnnnnnnnnnnnnnnnnnnnnnnnnnnnnnnnnnnnnnnnnnnnnnnnnnnnnnnnnnnnnnnnnnnnnnnnnnnnnnnnnnnnnnnnnnnnnnnnnnnnnnnnnnnnnnnnnnnnnnnnnnnnnnnnnnnnnnnnnnnnnnnnnnnnnnnnnnnnnnnnnnnnnnnnnnnnnnnnnnnnnnnnnnnnnnnnnnnnnnnnnnnnnnnnnnnnnnnnnnnnnnnnnnnnnnnnnnnnnnnnnnnnnnnnnnnnnnnnnnnnnnnnnnnnnnnnnnnnnnnnnnnnnnnnnnnnnnnnnnnnnnnnnnnnnnnnnnnnnnnnnnnnnnnnnnnnnnnnnnnnnnnnnnnnnnnnnnnnnnnnnnnnnnnnnnnnnnnnnnnnnnnnnnnnnnnnnnnnnnnnnnnnnnnnnnnnnnnnnnnnnnnnnnnnnnnnnnnnnnnnnnnnnnnnnnnnnnnnnnnnnnnnnnnnnnnnnnnnnnnnnnnnnnnnnnnnnnnnnnnnnnnnnnnnnnnnnnnnnnnnnnnnnnnnnnnnnnnnnnnnnnnnnnnnnnnnnnnnnnnnnnnnnnnnnnnnnnnnnnnnnnnnnnnnnnnnnnnnnnnnnnnnnnnnnnnnnnnnnnnnnnnnnnnnnnnnnnnnnnnnnnnnnnnnnnnnnnnnnnnnnnnnnnnnnnnnnnnnnnnnnnnnnnnnnnnnnnnnnnnnnnnnnnnnnnnnnnnnnnnnnnnnnnnnnnnnnnnnnnnnnnnnnnnnnnnnnnnnnnnnnnnnnnnnnnnnnnnnnnnnnnnnnnnnnnnnnnnnnnnnnnnnnnnnnnnnnnnnnnnnnnnnnnnnnnnnnnnnnnnnnnnnnnnnnnnnnnnnnnnnnnnnnnnnnnnnnnnnnnnnnnnnnnnnnnnnnnnnnnnnnnnnnnnnnnnnnnnnnnnnnnnnnnnnnnnnnnnnnnnnnnnnnnnnnnnnnnnnnnnnnnnnnnnnnnnnnnnnnnnnnnnnnnnnnnnnnnnnnnnnnnnnnnnnnnnnnnnnnnnnnnnnnnnnnnnnnnnnnnnnnnnnnnnnnnnnnnnnnnnnnnnnnnnnnnnnnnnnnnnnnnnnnnnnnnnnnnnnnnnnnnnnnnnnnnnnnnnnnnnnnnnnnnnnnnnnnnnnnnnnnnnnnnnnnnnnnnnnnnnnnnnnnnnnnnnnnnnnnnnnnnnnnnnnnnnnnnnnnnnnnnnnnnnnnnnnnnnnnnnnnnnnnnnnnnnnnnnnnnnnnnnnnnnnnnnnnnnnnnnnnnnnnnnnnnnnnnnnnnnnnnnnnnnnnnnnnnnnnnnnnnnnnnnnnnnnnnnnnnnnnnnnnnnnnnnnnnnnnnnnnnnnnnnnnnnnnnnnnnnnnnnnnnnnnnnnnnnnnnnnnnnnnnnnnnnnnnnnnnnnnnnnnnnnnnnnnnnnnnnnnnnnnnnnnnnnnnnnnnnnnnnnnnnnnnnnnnnnnnnnnnnnnnnnnnnnnnnnnnnnnnnnnnnnnnnnnnnnnnnnnnnnnnnnnnnnnnnnnnnnnnnnnnnnnnnnnnnnnnnnnnnnnnnnnnnnnnnnnnnnnnnnnnnnnnnnnnnnnnnnnnnnnnnnnnnnnnnnnnnnnnnnnnnnnnnnnnnnnnnnnnnnnnnnnnnnnnnnnnnnnnnnnnnnnnnnnnnnnnnnnnnnnnnnnnnnnnnnnnnnnnnnnnnnnnnnnnnnnnnnnnnnnnnnnnnnnnnnnnnnnnnnnnnnnnnnnnnnnnnnnnnnnnnnnnnnnnnnnnnnnnnnnnnnnnnnnnnnnnnnnnnnnnnnnnnnnnnnnnnnnnnnnnnnnnnnnnnnnnnnnnnnnnnnnnnnnnnnnnnnnnnnnnnnnnnnnnnnnnnnnnnnnnnnnnnnnnnnnnnnnnnnnnnnnnnnnnnnnnnnnnnnnnnnnnnnnnnnnnnnnnnnnnnnnnnnnnnnnnnnnnnnnnnnnnnnnnnnnnnnnnnnnnnnnnnnnnnnnnnnnnnnnnnnnnnnnnnnnnnnnnnnnnnnnnnnnnnnnnnnnnnnnnnnnnnnnnnnnnnnnnnnnnnnnnnnnnnnnnnnnnnnnnnnnnnnnnnnnnnnnnnnnnnnnnnnnnnnnnnnnnnnnnnnnnnnnnnnnnnnnnnnnnnnnnnnnnnnnnnnnnnnnnnnnnnnnnnnnnnnnnnnnnnnnnnnnnnnnnnnnnnnnnnnnnnnnnnnnnnnnnnnnnnnnnnnnnnnnnnnnnnnnnnnnnnnnnnnnnnnnnnnnnnnnnnnnnnnnnnnnnnnnnnnnnnnnnnnnnnnnnnnnnnnnnnnnnnnnnnnnnnnnnnnnnnnnnnnnnnnnnnnnnnnnnnnnnnnnnnnnnnnnnnnnnnnnnnnnnnnnnnnnnnnnnnnnnnnnnnnnnnnnnnnnnnnnnnnnnnnnnnnnnnnnnnnnnnnnnnnnnnnnnnnnnnnnnnnnnnnnnnnnnnnnnnnnnnnnnnnnnnnnnnnnnnnnnnnnnnnnnnnnnnnnnnnnnnnnnnnnnnnnnnnnnnnnnnnnnnnnnnnnnnnnnnnnnnnnnnnnnnnnnnnnnnnnnnnnnnnnnnnnnnnnnnnnnnnnnnnnnnnnnnnnnnnnnnnnnnnnnnnnnnnnnnnnnnnnnnnnnnnnnnnnnnnnnnnnnnnnnnnnnnnnnnnnnnnnnnnnnnnnnnnnnnnnnnnnnnnnnnnnnnnnnnnnnnnnnnnnnnnnnnnnnnnnnnnnnnnnnnnnnnnnnnnnnnnnnnnnnnnnnnnnnnnnnnnnnnnnnnnnnnnnnnnnnnnnnnnnnnnnnnnnnnnnnnnnnnnnnnnnnnnnnnnnnnnnnnnnnnnnnnnnnnnnnnnnnnnnnnnnnnnnnnnnnnnnnnnnnnnnnnnnnnnnnnnnnnnnnnnnnnnnnnnnnnnnnnnnnnnnnnnnnnnnnnnnnnnnnnnnnnnnnnnnnnnnnnnnnnnnnnnnnnnnnnnnnnnnnnnnnnnnnnnnnnnnnnnnnnnnnnnnnnnnnnnnnnnnnnnnnnnnnnnnnnnnnnnnnnnnnnnnnnnnnnnnnnnnnnnnnnnnnnnnnnnnnnnnnnnnnnnnnnnnnnnnnnnnnnnnnnnnnnnnnnnnnnnnnnnnnnnnnnnnnnnnnnnnnnnnnnnnnnnnnnnnnnnnnnnnnnnnnnnnnnnnnnnnnnnnnnnnnnnnnnnnnnnnnnnnnnnnnnnnnnnnnnnnnnnnnnnnnnnnnnnnnnnnnnnnnnnnnnnnnnnnnnnnnnnnnnnnnnnnnnnnnnnnnnnnnnnnnnnnnnnnnnnnnnnnnnnnnnnnnnnnnnnnnnnnnnnnnnnnnnnnnnnnnnnnnnnnnnnnnnnnnnnnnnnnnnnnnnnnnnnnnnnnnnnnnnnnnnnnnnnnnnnnnnnnnnnnnnnnnnnnnnnnnnnnnnnnnnnnnnnnnnnnnnnnnnnnnnnnnnnnnnnnnnnnnnnnnnnnnnnnnnnnnnnnnnnnnnnnnnnnnnnnnnnnnnnnnnnnnnnnnnnnnnnnnnnnnnnnnnnnnnnnnnnnnnnnnnnnnnnnnnnnnnnnnnnnnnnnnnnnnnnnnnnnnnnnnnnnnnnnnnnnnnnnnnnnnnnnnnnnnnnnnnnnnnnnnnnnnnnnnnnnnnnnnnnnnnnnnnnnnnnnnnnnnnnnnnnnnnnnnnnnnnnnnnnnnnnnnnnnnnnnnnnnnnnnnnnnnnnnnnnnnnnnnnnnnnnnnnnnnnnnnnnnnnnnnnnnnnnnnnnnnnnnnnnnnnnnnnnnnnnnnnnnnnnnnnnnnnnnnnnnnnnnnnnnnnnnnnnnnnnnnnnnnnnnnnnnnnnnnnnnnnnnnnnnnnnnnnnnnnnnnnnnnnnnnnnnnnnnnnnnnnnnnnnnnnnnnnnnnnnnnnnnnnnnnnnnnnnnnnnnnnnnnnnnnnnnnnnnnnnnnnnnnnnnnnnnnnnnnnnnnnnnnnnnnnnnnnnnnnnnnnnnnnnnnnnnnnnnnnnnnnnnnnnnnnnnnnnnnnnnnnnnnnnnnnnnnnnnnnnnnnnnnnnnnnnnnnnnnnnnnnnnnnnnnnnnnnnnnnnnnnnnnnnnnnnnnnnnnnnnnnnnnnnnnnnnnnnnnnnnnnnnnnnnnnnnnnnnnnnnnnnnnnnnnnnnnnnnnnnnnnnnnnnnnnnnnnnnnnnnnnnnnnnnnnnnnnnnnnnnnnnnnnnnnnnnnnnnnnnnnnnnnnnnnnnnnnnnnnnnnnnnnnnnnnnnnnnnnnnnnnnnnnnnnnnnnnnnnnnnnnnnnnnnnnnnnnnnnnnnnnnnnnnnnnnnnnnnnnnnnnnnnnnnnnnnnnnnnnnnnnnnnnnnnnnnnnnnnnnnnnnnnnnnnnnnnnnnnnnnnnnnnnnnnnnnnnnnnnnnnnnnnnnnnnnnnnnnnnnnnnnnnnnnnnnnnnnnnnnnnnnnnnnnnnnnnnnnnnnnnnnnnnnnnnnnnnnnnnnnnnnnnnnnnnnnnnnnnnnnnnnnnnnnnnnnnnnnnnnnnnnnnnnnnnnnnnnnnnnnnnnnnnnnnnnnnnnnnnnnnnnnnnnnnnnnnnnnnnnnnnnnnnnnnnnnnnnnnnnnnnnnnnnnnnnnnnnnnnnnnnnnnnnnnnnnnnnnnnnnnnnnnnnnnnnnnnnnnnnnnnnnnnnnnnnnnnnnnnnnnnnnnnnnnnnnnnnnnnnnnnnnnnnnnnnnnnnnnnnnnnnnnnnnnnnnnnnnnnnnnnnnnnnnnnnnnnnnnnnnnnnnnnnnnnnnnnnnnnnnnnnnnnnnnnnnnnnnnnnnnnnnnnnnnnnnnnnnnnnnnnnnnnnnnnnnnnnnnnnnnnnnnnnnnnnnnnnnnnnnnnnnnnnnnnnnnnnnnnnnnnnnnnnnnnnnnnnnnnnnnnnnnnnnnnnnnnnnnnnnnnnnnnnnnnnnnnnnnnnnnnnnnnnnnnnnnnnnnnnnnnnnnnnnnnnnnnnnnnnnnnnnnnnnnnnnnnnnnnnnnnnnnnnnnnnnnnnnnnnnnnnnnnnnnnnnnnnnnnnnnnnnnnnnnnnnnnnnnnnnnnnnnnnnnnnnnnnnnnnnnnnnnnnnnnnnnnnnnnnnnnnnnnnnnnnnnnnnnnnnnnnnnnnnnnnnnnnnnnnnnnnnnnnnnnnnnnnnnnnnnnnnnnnnnnnnnnnnnnnnnnnnnnnnnnnnnnnnnnnnnnnnnnnnnnnnnnnnnnnnnnnnnnnnnnnnnnnnnnnnnnnnnnnnnnnnnnnnnnnnnnnnnnnnnnnnnnnnnnnnnnnnnnnnnnnnnnnnnnnnnnnnnnnnnnnnnnnnnnnnnnnnnnnnnnnnnnnnnnnnnnnnnnnnnnnnnnnnnnnnnnnnnnnnnnnnnnnnnnnnnnnnnnnnnnnnnnnnnnnnnnnnnnnnnnnnnnnnnnnnnnnnnnnnnnnnnnnnnnnnnnnnnnnnnnnnnnnnnnnnnnnnnnnnnnnnnnnnnnnnnnnnnnnnnnnnnnnnnnnnnnnnnnnnnnnnnnnnnnnnnnnnnnnnnnnnnnnnnnnnnnnnnnnnnnnnnnnnnnnnnnnnnnnnnnnnnnnnnnnnnnnnnnnnnnnnnnnnnnnnnnnnnnnnnnnnnnnnnnnnnnnnnnnnnnnnnnnnnnnnnnnnnnnnnnnnnnnnnnnnnnnnnnnnnnnnnnnnnnnnnnnnnnnnnnnnnnnnnnnnnnnnnnnnnnnnnnnnnnnnnnnnnnnnnnnnnnnnnnnnnnnnnnnnnnnnnnnnnnnnnnnnnnnnnnnnnnnnnnnnnnnnnnnnnnnnnnnnnnnnnnnnnnnnnnnnnnnnnnnnnnnnnnnnnnnnnnnnnnnnnnnnnnnnnnnnnnnnnnnnnnnnnnnnnnnnnnnnnnnnnnnnnnnnnnnnnnnnnnnnnnnnnnnnnnnnnnnnnnnnnnnnnnnnnnnnnnnnnnnnnnnnnnnnnnnnnnnnnnnnnnnnnnnnnnnnnnnnnnnnnnnnnnnnnnnnnnnnnnnnnnnnnnnnnnnnnnnnnnnnnnnnnnnnnnnnnnnnnnnnnnnnnnnnnnnnnnnnnnnnnnnnnnnnnnnnnnnnnnnnnnnnnnnnnnnnnnnnnnnnnnnnnnnnnnnnnnnnnnnnnnnnnnnnnnnnnnnnnnnnnnnnnnnnnnnnnnnnnnnnnnnnnnnnnnnnnnnnnnnnnnnnnnnnnnnnnnnnnnnnnnnnnnnnnnnnnnnnnnnnnnnnnnnnnnnnnnnnnnnnnnnnnnnnnnnnnnnnnnnnnnnnnnnnnnnnnnnnnnnnnnnnnnnnnnnnnnnnnnnnnnnnnnnnnnnnnnnnnnnnnnnnnnnnnnnnnnnnnnnnnnnnnnnnnnnnnnnnnnnnnnnnnnnnnnnnnnnnnnnnnnnnnnnnnnnnnnnnnnnnnnnnnnnnnnnnnnnnnnnnnnnnnnnnnnnnnnnnnnnnnnnnnnnnnnnnnnnnnnnnnnnnnnnnnnnnnnnnnnnnnnnnnnnnnnnnnnnnnnnnnnnnnnnnnnnnnnnnnnnnnnnnnnnnnnnnnnnnnnnnnnnnnnnnnnnnnnnnnnnnnnnnnnnnnnnnnnnnnnnnnnnnnnnnnnnnnnnnnnnnnnnnnnnnnnnnnnnnnnnnnnnnnnnnnnnnnnnnnnnnnnnnnnnnnnnnnnnnnnnnnnnnnnnnnnnnnnnnnnnnnnnnnnnnnnnnnnnnnnnnnnnnnnnnnnnnnnnnnnnnnnnnnnnnnnnnnnnnnnnnnnnnnnnnnnnnnnnnnnnnnnnnnnnnnnnnnnnnnnnnnnnnnnnnnnnnnnnnnnnnnnnnnnnnnnnnnnnnnnnnnnnnnnnnnnnnnnnnnnnnnnnnnnnnnnnnnnnnnnnnnnnnnnnnnnnnnnnnnnnnnnnnnnnnnnnnnnnnnnnnnnnnnnnnnnnnnnnnnnnnnnnnnnnnnnnnnnnnnnnnnnnnnnnnnnnnnnnnnnnnnnnnnnnnnnnnnnnnnnnnnnnnnnnnnnnnnnnnnnnnnnnnnnnnnnnnnnnnnnnnnnnnnnnnnnnnnnnnnnnnnnnnnnnnnnnnnnnnnnnnnnnnnnnnnnnnnnnnnnnnnnnnnnnnnnnnnnnnnnnnnnnnnnnnnnnnnnnnnnnnnnnnnnnnnnnnnnnnnnnnnnnnnnnnnnnnnnnnnnnnnnnnnnnnnnnnnnnnnnnnnnnnnnnnnnnnnnnnnnnnnnnnnnnnnnnnnnnnnnnnnnnnnnnnnnnnnnnnnnnnnnnnnnnnnnnnnnnnnnnnnnnnnnnnnnnnnnnnnnnnnnnnnnnnnnnnnnnnnnnnnnnnnnnnnnnnnnnnnnnnnnnnnnnnnnnnnnnnnnnnnnnnnnnnnnnnnnnnnnnnnnnnnnnnnnnnnnnnnnnnnnnnnnnnnnnnnnnnnnnnnnnnnnnnnnnnnnnnnnnnnnnnnnnnnnnnnnnnnnnnnnnnnnnnnnnnnnnnnnnnnnnnnnnnnnnnnnnnnnnnnnnnnnnnnnnnnnnnnnnnnnnnnnnnnnnnnnnnnnnnnnnnnnnnnnnnnnnnnnnnnnnnnnnnnnnnnnnnnnnnnnnnnnnnnnnnnnnnnnnnnnnnnnnnnnnnnnnnnnnnnnnnnnnnnnnnnnnnnnnnnnnnnnnnnnnnnnnnnnnnnnnnnnnnnnnnnnnnnnnnnnnnnnnnnnnnnnnnnnnnnnnnnnnnnnnnnnnnnnnnnnnnnnnnnnnnnnnnnnnnnnnnnnnnnnnnnnnnnnnnnnnnnnnnnnnnnnnnnnnnnnnnnnnnnnnnnnnnnnnnnnnnnnnnnnnnnnnnnnnnnnnnnnnnnnnnnnnnnnnnnnnnnnnnnnnnnnnnnnnnnnnnnnnnnnnnnnnnnnnnnnnnnnnnnnnnnnnnnnnnnnnnnnnnnnnnnnnnnnnnnnnnnnnnnnnnnnnnnnnnnnnnnnnnnnnnnnnnnnnnnnnnnnnnnnnnnnnnnnnnnnnnnnnnnnnnnnnnnnnnnnnnnnnnnnnnnnnnnnnnnnnnnnnnnnnnnnnnnnnnnnnnnnnnnnnnnnnnnnnnnnnnnnnnnnnnnnnnnnnnnnnnnnnnnnnnnnnnnnnnnnnnnnnnnnnnnnnnnnnnnnnnnnnnnnnnnnnnnnnnnnnnnnnnnnnnnnnnnnnnnnnnnnnnnnnnnnnnnnnnnnnnnnnnnnnnnnnnnnnnnnnnnnnnnnnnnnnnnnnnnnnnnnnnnnnnnnnnnnnnnnnnnnnnnnnnnnnnnnnnnnnnnnnnnnnnnnnnnnnnnnnnnnnnnnnnnnnnnnnnnnnnnnnnnnnnnnnnnnnnnnnnnnnnnnnnnnnnnnnnnnnnnnnnnnnnnnnnnnnnnnnnnnnnnnnnnnnnnnnnnnnnnnnnnnnnnnnnnnnnnnnnnnnnnnnnnnnnnnnnnnnnnnnnnnnnnnnnnnnnnnnnnnnnnnnnnnnnnnnnnnnnnnnnnnnnnnnnnnnnnnnnnnnnnnnnnnnnnnnnnnnnnnnnnnnnnnnnnnnnnnnnnnnnnnnnnnnnnnnnnnnnnnnnnnnnnnnnnnnnnnnnnnnnnnnnnnnnnnnnnnnnnnnnnnnnnnnnnnnnnnnnnnnnnnnnnnnnnnnnnnnnnnnnnnnnnnnnnnnnnnnnnnnnnnnnnnnnnnnnnnnnnnnnnnnnnnnnnnnnnnnnnnnnnnnnnnnnnnnnnnnnnnnnnnnnnnnnnnnnnnnnnnnnnnnnnnnnnnnnnnnnnnnnnnnnnnnnnnnnnnnnnnnnnnnnnnnnnnnnnnnnnnnnnnnnnnnnnnnnnnnnnnnnnnnnnnnnnnnnnnnnnnnnnnnnnnnnnnnnnnnnnnnnnnnnnnnnnnnnnnnnnnnnnnnnnnnnnnnnnnnnnnnnnnnnnnnnnnnnnnnnnnnnnnnnnnnnnnnnnnnnnnnnnnnnnnnnnnnnnnnnnnnnnnnnnnnnnnnnnnnnnnnnnnnnnnnnnnnnnnnnnnnnnnnnnnnnnnnnnnnnnnnnnnnnnnnnnnnnnnnnnnnnnnnnnnnnnnnnnnnnnnnnnnnnnnnnnnnnnnnnnnnnnnnnnnnnnnnnnnnnnnnnnnnnnnnnnnnnnnnnnnnnnnnnnnnnnnnnnnnnnnnnnnnnnnnnnnnnnnnnnnnnnnnnnnnnnnnnnnnnnnnnnnnnnnnnnnnnnnnnnnnnnnnnnnnnnnnnnnnnnnnnnnnnnnnnnnnnnnnnnnnnnnnnnnnnnnnnnnnnnnnnnnnnnnnnnnnnnnnnnnnnnnnnnnnnnnnnnnnnnnnnnnnnnnnnnnnnnnnnnnnnnnnnnnnnnnnnnnnnnnnnnnnnnnnnnnnnnnnnnnnnnnnnnnnnnnnnnnnnnnnnnnnnnnnnnnnnnnnnnnnnnnnnnnnnnnnnnnnnnnnnnnnnnnnnnnnnnnnnnnnnnnnnnnnnnnnnnnnnnnnnnnnnnnnnnnnnnnnnnnnnnnnnnnnnnnnnnnnnnnnnnnnnnnnnnnnnnnnnnnnnnnnnnnnnnnnnnnnnnnnnnnnnnnnnnnnnnnnnnnnnnnnnnnnnnnnnnnnnnnnnnnnnnnnnnnnnnnnnnnnnnnnnnnnnnnnnnnnnnnnnnnnnnnnnnnnnnnnnnnnnnnnnnnnnnnnnnnnnnnnnnnnnnnnnnnnnnnnnnnnnnnnnnnnnnnnnnnnnnnnnnnnnnnnnnnnnnnnnnnnnnnnnnnnnnnnnnnnnnnnnnnnnnnnnnnnnnnnnnnnnnnnnnnnnnnnnnnnnnnnnnnnnnnnnnnnnnnnnnnnnnnnnnnnnnnnnnnnnnnnnnnnnnnnnnnnnnnnnnnnnnnnnnnnnnnnnnnnnnnnnnnnnnnnnnnnnnnnnnnnnnnnnnnnnnnnnnnnnnnnnnnnnnnnnnnnnnnnnnnnnnnnnnnnnnnnnnnnnnnnnnnnnnnnnnnnnnnnnnnnnnnnnnnnnnnnnnnnnnnnnnnnnnnnnnnnnnnnnnnnnnnnnnnnnnnnnnnnnnnnnnnnnnnnnnnnnnnnnnnnnnnnnnnnnnnnnnnnnnnnnnnnnnnnnnnnnnnnnnnnnnnnnnnnnnnnnnnnnnnnnnnnnnnnnnnnnnnnnnnnnnnnnnnnnnnnnnnnnnnnnnnnnnnnnnnnnnnnnnnnnnnnnnnnnnnnnnnnnnnnnnnnnnnnnnnnnnnnnnnnnnnnnnnnnnnnnnnnnnnnnnnnnnnnnnnnnnnnnnnnnnnnnnnnnnnnnnnnnnnnnnnnnnnnnnnnnnnnnnnnnnnnnnnnnnnnnnnnnnnnnnnnnnnnnnnnnnnnnnnnnnnnnnnnnnnnnnnnnnnnnnnnnnnnnnnnnnnnnnnnnnnnnnnnnnnnnnnnnnnnnnnnnnnnnnnnnnnnnnnnnnnnnnnnnnnnnnnnnnnnnnnnnnnnnnnnnnnnnnnnnnnnnnnnnnnnnnnnnnnnnnnnnnnnnnnnnnnnnnnnnnnnnnnnnnnnnnnnnnnnnnnnnnnnnnnnnnnnnnnnnnnnnnnnnnnnnnnnnnnnnnnnnnnnnnnnnnnnnnnnnnnnnnnnnnnnnnnnnnnnnnnnnnnnnnnnnnnnnnnnnnnnnnnnnnnnnnnnnnnnnnnnnnnnnnnnnnnnnnnnnnnnnnnnnnnnnnnnnnnnnnnnnnnnnnnnnnnnnnnnnnnnnnnnnnnnnnnnnnnnnnnnnnnnnnnnnnnnnnnnnnnnnnnnnnnnnnnnnnnnnnnnnnnnnnnnnnnnnnnnnnnnnnnnnnnnnnnnnnnnnnnnnnnnnnnnnnnnnnnnnnnnnnnnnnnnnnnnnnnnnnnnnnnnnnnnnnnnnnnnnnnnnnnnnnnnnnnnnnnnnnnnnnnnnnnnnnnnnnnnnnnnnnnnnnnnnnnnnnnnnnnnnnnnnnnnnnnnnnnnnnnnnnnnnnnnnnnnnnnnnnnnnnnnnnnnnnnnnnnnnnnnnnnnnnnnnnnnnnnnnnnnnnnnnnnnnnnnnnnnnnnnnnnnnnnnnnnnnnnnnnnnnnnnnnnnnnnnnnnnnnnnnnnnnnnnnnnnnnnnnnnnnnnnnnnnnnnnnnnnnnnnnnnnnnnnnnnnnnnnnnnnnnnnnnnnnnnnnnnnnnnnnnnnnnnnnnnnnnnnnnnnnnnnnnnnnnnnnnnnnnnnnnnnnnnnnnnnnnnnnnnnnnnnnnnnnnnnnnnnnnnnnnnnnnnnnnnnnnnnnnnnnnnnnnnnnnnnnnnnnnnnnnnnnnnnnnnnnnnnnnnnnnnnnnnnnnnnnnnnnnnnnnnnnnnnnnnnnnnnnnnnnnnnnnnnnnnnnnnnnnnnnnnnnnnnnnnnnnnnnnnnnnnnnnnnnnnnnnnnnnnnnnnnnnnnnnnnnnnnnnnnnnnnnnnnnnnnnnnnnnnnnnnnnnnnnnnnnnnnnnnnnnnnnnnnnnnnnnnnnnnnnnnnnnnnnnnnnnnnnnnnnnnnnnnnnnnnnnnnnnnnnnnnnnnnnnnnnnnnnnnnnnnnnnnnnnnnnnnnnnnnnnnnnnnnnnnnnnnnnnnnnnnnnnnnnnnnnnnnnnnnnnnnnnnnnnnnnnnnnnnnnnnnnnnnnnnnnnnnnnnnnnnnnnnnnnnnnnnnnnnnnnnnnnnnnnnnnnnnnnnnnnnnnnnnnnnnnnnnnnnnnnnnnnnnnnnnnnnnnnnnnnnnnnnnnnnnnnnnnnnnnnnnnnnnnnnnnnnnnnnnnnnnnnnnnnnnnnnnnnnnnnnnnnnnnnnnnnnnnnnnnnnnnnnnnnnnnnnnnnnnnnnnnnnnnnnnnnnnnnnnnnnnnnnnnnnnnnnnnnnnnnnnnnnnnnnnnnnnnnnnnnnnnnnnnnnnnnnnnnnnnnnnnnnnnnnnnnnnnnnnnnnnnnnnnnnnnnnnnnnnnnnnnnnnnnnnnnnnnnnnnnnnnnnnnnnnnnnnnnnnnnnnnnnnnnnnnnnnnnnnnnnnnnnnnnnnnnnnnnnnnnnnnnnnnnnnnnnnnnnnnnnnnnnnnnnnnnnnnnnnnnnnnnnnnnnnnnnnnnnnnnnnnnnnnnnnnnnnnnnnnnnnnnnnnnnnnnnnnnnnnnnnnnnnnnnnnnnnnnnnnnnnnnnnnnnnnnnnnnnnnnnnnnnnnnnnnnnnnnnnnnnnnnnnnnnnnnnnnnnnnnnnnnnnnnnnnnnnnnnnnnnnnnnnnnnnnnnnnnnnnnnnnnnnnnnnnnnnnnnnnnnnnnnnnnnnnnnnnnnnnnnnnnnnnnnnnnnnnnnnnnnnnnnnnnnnnnnnnnnnnnnnnnnnnnnnnnnnnnnnnnnnnnnnnnnnnnnnnnnnnnnnnnnnnnnnnnnnnnnnnnnnnnnnnnnnnnnnnnnnnnnnnnnnnnnnnnnnnnnnnnnnnnnnnnnnnnnnnnnnnnnnnnnnnnnnnnnnnnnnnnnnnnnnnnnnnnnnnnnnnnnnnnnnnnnnnnnnnnnnnnnnnnnnnnnnnnnnnnnnnnnnnnnnnnnnnnnnnnnnnnnnnnnnnnnnnnnnnnnnnnnnnnnnnnnnnnnnnnnnnnnnnnnnnnnnnnnnnnnnnnnnnnnnnnnnnnnnnnnnnnnnnnnnnnnnnnnnnnnnnnnnnnnnnnnnnnnnnnnnnnnnnnnnnnnnnnnnnnnnnnnnnnnnnnnnnnnnnnnnnnnnnnnnnnnnnnnnnnnnnnnnnnnnnnnnnnnnnnnnnnnnnnnnnnnnnnnnnnnnnnnnnnnnnnnnnnnnnnnnnnnnnnnnnnnnnnnnnnnnnnnnnnnnnnnnnnnnnnnnnnnnnnnnnnnnnnnnnnnnnnnnnnnnnnnnnnnnnnnnnnnnnnnnnnnnnnnnnnnnnnnnnnnnnnnnnnnnnnnnnnnnnnnnnnnnnnnnnnnnnnnnnnnnnnnnnnnnnnnnnnnnnnnnnnnnnnnnnnnnnnnnnnnnnnnnnnnnnnnnnnnnnnnnnnnnnnnnnnnnnnnnnnnnnnnnnnnnnnnnnnnnnnnnnnnnnnnnnnnnnnnnnnnnnnnnnnnnnnnnnnnnnnnnnnnnnnnnnnnnnnnnnnnnnnnnnnnnnnnnnnnnnnnnnnnnnnnnnnnnnnnnnnnnnnnnnnnnnnnnnnnnnnnnnnnnnnnnnnnnnnnnnnnnnnnnnnnnnnnnnnnnnnnnnnnnnnnnnnnnnnnnnnnnnnnnnnnnnnnnnnnnnnnnnnnnnnnnnnnnnnnnnnnnnnnnnnnnnnnnnnnnnnnnnnnnnnnnnnnnnnnnnnnnnnnnnnnnnnnnnnnnnnnnnnnnnnnnnnnnnnnnnnnnnnnnnnnnnnnnnnnnnnnnnnnnnnnnnnnnnnnnnnnnnnnnnnnnnnnnnnnnnnnnnnnnnnnnnnnnnnnnnnnnnnnnnnnnnnnnnnnnnnnnnnnnnnnnnnnnnnnnnnnnnnnnnnnnnnnnnnnnnnnnnnnnnnnnnnnnnnnnnnnnnnnnnnnnnnnnnnnnnnnnnnnnnnnnnnnnnnnnnnnnnnnnnnnnnnnnnnnnnnnnnnnnnnnnnnnnnnnnnnnnnnnnnnnnnnnnnnnnnnnnnnnnnnnnnnnnnnnnnnnnnnnnnnnnnnnnnnnnnnnnnnnnnnnnnnnnnnnnnnnnnnnnnnnnnnnnnnnnnnnnnnnnnnnnnnnnnnnnnnnnnnnnnnnnnnnnnnnnnnnnnnnnnnnnnnnnnnnnnnnnnnnnnnnnnnnnnnnnnnnnnnnnnnnnnnnnnnnnnnnnnnnnnnnnnnnnnnnnnnnnnnnnnnnnnnnnnnnnnnnnnnnnnnnnnnnnnnnnnnnnnnnnnnnnnnnnnnnnnnnnnnnnnnnnnnnnnnnnnnnnnnnnnnnnnnnnnnnnnnnnnnnnnnnnnnnnnnnnnnnnnnnnnnnnnnnnnnnnnnnnnnnnnnnnnnnnnnnnnnnnnnnnnnnnnnnnnnnnnnnnnnnnnnnnnnnnnnnnnnnnnnnnnnnnnnnnnnnnnnnnnnnnnnnnnnnnnnnnnnnnnnnnnnnnnnnnnnnnnnnnnnnnnnnnnnnnnnnnnnnnnnnnnnnnnnnnnnnnnnnnnnnnnnnnnnnnnnnnnnnnnnnnnnnnnnnnnnnnnnnnnnnnnnnnnnnnnnnnnnnnnnnnnnnnnnnnnnnnnnnnnnnnnnnnnnnnnnnnnnnnnnnnnnnnnnnnnnnnnnnnnnnnnnnnnnnnnnnnnnnnnnnnnnnnnnnnnnnnnnnnnnnnnnnnnnnnnnnnnnnnnnnnnnnnnnnnnnnnnnnnnnnnnnnnnnnnnnnnnnnnnnnnnnnnnnnnnnnnnnnnnnnnnnnnnnnnnnnnnnnnnnnnnnnnnnnnnnnnnnnnnnnnnnnnnnnnnnnnnnnnnnnnnnnnnnnnnnnnnnnnnnnnnnnnnnnnnnnnnnnnnnnnnnnnnnnnnnnnnnnnnnnnnnnnnnnnnnnnnnnnnnnnnnnnnnnnnnnnnnnnnnnnnnnnnnnnnnnnnnnnnnnnnnnnnnnnnnnnnnnnnnnnnnnnnnnnnnnnnnnnnnnnnnnnnnnnnnnnnnnnnnnnnnnnnnnnnnnnnnnnnnnnnnnnnnnnnnnnnnnnnnnnnnnnnnnnnnnnnnnnnnnnnnnnnnnnnnnnnnnnnnnnnnnnnnnnnnnnnnnnnnnnnnnnnnnnnnnnnnnnnnnnnnnnnnnnnnnnnnnnnnnnnnnnnnnnnnnnnnnnnnnnnnnnnnnnnnnnnnnnnnnnnnnnnnnnnnnnnnnnnnnnnnnnnnnnnnnnnnnnnnnnnnnnnnnnnnnnnnnnnnnnnnnnnnnnnnnnnnnnnnnnnnnnnnnnnnnnnnnnnnnnnnnnnnnnnnnnnnnnnnnnnnnnnnnnnnnnnnnnnnnnnnnnnnnnnnnnnnnnnnnnnnnnnnnnnnnnnnnnnnnnnnnnnnnnnnnnnnnnnnnnnnnnnnnnnnnnnnnnnnnnnnnnnnnnnnnnnnnnnnnnnnnnnnnnnnnnnnnnnnnnnnnnnnnnnnnnnnnnnnnnnnnnnnnnnnnnnnnnnnnnnnnnnnnnnnnnnnnnnnnnnnnnnnnnnnnnnnnnnnnnnnnnnnnnnnnnnnnnnnnnnnnnnnnnnnnnnnnnnnnnnnnnnnnnnnnnnnnnnnnnnnnnnnnnnnnnnnnnnnnnnnnnnnnnnnnnnnnnnnnnnnnnnnnnnnnnnnnnnnnnnnnnnnnnnnnnnnnnnnnnnnnnnnnnnnnnnnnnnnnnnnnnnnnnnnnnnnnnnnnnnnnnnnnnnnnnnnnnnnnnnnnnnnnnnnnnnnnnnnnnnnnnnnnnnnnnnnnnnnnnnnnnnnnnnnnnnnnnnnnnnnnnnnnnnnnnnnnnnnnnnnnnnnnnnnnnnnnnnnnnnnnnnnnnnnnnnnnnnnnnnnnnnnnnnnnnnnnnnnnnnnnnnnnnnnnnnnnnnnnnnnnnnnnnnnnnnnnnnnnnnnnnnnnnnnnnnnnnnnnnnnnnnnnnnnnnnnnnnnnnnnnnnnnnnnnnnnnnnnnnnnnnnnnnnnnnnnnnnnnnnnnnnnnnnnnnnnnnnnnnnnnnnnnnnnnnnnnnnnnnnnnnnnnnnnnnnnnnnnnnnnnnnnnnnnnnnnnnnnnnnnnnnnnnnnnnnnnnnnnnnnnnnnnnnnnnnnnnnnnnnnnnnnnnnnnnnnnnnnnnnnnnnnnnnnnnnnnnnnnnnnnnnnnnnnnnnnnnnnnnnnnnnnnnnnnnnnnnnnnnnnnnnnnnnnnnnnnnnnnnnnnnnnnnnnnnnnnnnnnnnnnnnnnnnnnnnnnnnnnnnnnnnnnnnnnnnnnnnnnnnnnnnnnnnnnnnnnnnnnnnnnnnnnnnnnnnnnnnnnnnnnnnnnnnnnnnnnnnnnnnnnnnnnnnnnnnnnnnnnnnnnnnnnnnnnnnnnnnnnnnnnnnnnnnnnnnnnnnnnnnnnnnnnnnnnnnnnnnnnnnnnnnnnnnnnnnnnnnnnnnnnnnnnnnnnnnnnnnnnnnnnnnnnnnnnnnnnnnnnnnnnnnnnnnnnnnnnnnnnnnnnnnnnnnnnnnnnnnnnnnnnnnnnnnnnnnnnnnnnnnnnnnnnnnnnnnnnnnnnnnnnnnnnnnnnnnnnnnnnnnnnnnnnnnnnnnnnnnnnnnnnnnnnnnnnnnnnnnnnnnnnnnnnnnnnnnnnnnnnnnnnnnnnnnnnnnnnnnnnnnnnnnnnnnnnnnnnnnnnnnnnnnnnnnnnnnnnnnnnnnnnnnnnnnnnnnnnnnnnnnnnnnnnnnnnnnnnnnnnnnnnnnnnnnnnnnnnnnnnnnnnnnnnnnnnnnnnnnnnnnnnnnnnnnnnnnnnnnnnnnnnnnnnnnnnnnnnnnnnnnnnnnnnnnnnnnnnnnnnnnnnnnnnnnnnnnnnnnnnnnnnnnnnnnnnnnnnnnnnnnnnnnnnnnnnnnnnnnnnnnnnnnnnnnnnnnnnnnnnnnnnnnnnnnnnnnnnnnnnnnnnnnnnnnnnnnnnnnnnnnnnnnnnnnnnnnnnnnnnnnnnnnnnnnnnnnnnnnnnnnnnnnnnnnnnnnnnnnnnnnnnnnnnnnnnnnnnnnnnnnnnnnnnnnnnnnnnnnnnnnnnnnnnnnnnnnnnnnnnnnnnnnnnnnnnnnnnnnnnnnnnnnnnnnnnnnnnnnnnnnnnnnnnnnnnnnnnnnnnnnnnnnnnnnnnnnnnnnnnnnnnnnnnnnnnnnnnnnnnnnnnnnnnnnnnnnnnnnnnnnnnnnnnnnnnnnnnnnnnnnnnnnnnnnnnnnnnnnnnnnnnnnnnnnnnnnnnnnnnnnnnnnnnnnnnnnnnnnnnnnnnnnnnnnnnnnnnnnnnnnnnnnnnnnnnnnnnnnnnnnnnnnnnnnnnnnnnnnnnnnnnnnnnnnnnnnnnnnnnnnnnnnnnnnnnnnnnnnnnnnnnnnnnnnnnnnnnnnnnnnnnnnnnnnnnnnnnnnnnnnnnnnnnnnnnnnnnnnnnnnnnnnnnnnnnnnnnnnnnnnnnnnnnnnnnnnnnnnnnnnnnnnnnnnnnnnnnnnnnnnnnnnnnnnnnnnnnnnnnnnnnnnnnnnnnnnnnnnnnnnnnnnnnnnnnnnnnnnnnnnnnnnnnnnnnnnnnnnnnnnnnnnnnnnnnnnnnnnnnnnnnnnnnnnnnnnnnnnnnnnnnnnnnnnnnnnnnnnnnnnnnnnnnnnnnnnnnnnnnnnnnnnnnnnnnnnnnnnnnnnnnnnnnnnnnnnnnnnnnnnnnnnnnnnnnnnnnnnnnnnnnnnnnnnnnnnnnnnnnnnnnnnnnnnnnnnnnnnnnnnnnnnnnnnnnnnnnnnnnnnnnnnnnnnnnnnnnnnnnnnnnnnnnnnnnnnnnnnnnnnnnnnnnnnnnnnnnnnnnnnnnnnnnnnnnnnnnnnnnnnnnnnnnnnnnnnnnnnnnnnnnnnnnnnnnnnnnnnnnnnnnnnnnnnnnnnnnnnnnnnnnnnnnnnnnnnnnnnnnnnnnnnnnnnnnnnnnnnnnnnnnnnnnnnnnnnnnnnnnnnnnnnnnnnnnnnnnnnnnnnnnnnnnnnnnnnnnnnnnnnnnnnnnnnnnnnnnnnnnnnnnnnnnnnnnnnnnnnnnnnnnnnnnnnnnnnnnnnnnnnnnnnnnnnnnnnnnnnnnnnnnnnnnnnnnnnnnnnnnnnnnnnnnnnnnnnnnnnnnnnnnnnnnnnnnnnnnnnnnnnnnnnnnnnnnnnnnnnnnnnnnnnnnnnnnnnnnnnnnnnnnnnnnnnnnnnnnnnnnnnnnnnnnnnnnnnnnnnnnnnnnnnnnnnnnnnnnnnnnnnnnnnnnnnnnnnnnnnnnnnnnnnnnnnnnnnnnnnnnnnnnnnnnnnnnnnnnnnnnnnnnnnnnnnnnnnnnnnnnnnnnnnnnnnnnnnnnnnnnnnnnnnnnnnnnnnnnnnnnnnnnnnnnnnnnnnnnnnnnnnnnnnnnnnnnnnnnnnnnnnnnnnnnnnnnnnnnnnnnnnnnnnnnnnnnnnnnnnnnnnnnnnnnnnnnnnnnnnnnnnnnnnnnnnnnnnnnnnnnnnnnnnnnnnnnnnnnnnnnnnnnnnnnnnnnnnnnnnnnnnnnnnnnnnnnnnnnnnnnnnnnnnnnnnnnnnnnnnnnnnnnnnnnnnnnnnnnnnnnnnnnnnnnnnnnnnnnnnnnnnnnnnnnnnnnnnnnnnnnnnnnnnnnnnnnnnnnnnnnnnnnnnnnnnnnnnnnnnnnnnnnnnnnnnnnnnnnnnnnnnnnnnnnnnnnnnnnnnnnnnnnnnnnnnnnnnnnnnnnnnnnnnnnnnnnnnnnnnnnnnnnnnnnnnnnnnnnnnnnnnnnnnnnnnnnnnnnnnnnnnnnnnnnnnnnnnnnnnnnnnnnnnnnnnnnnnnnnnnnnnnnnnnnnnnnnnnnnnnnnnnnnnnnnnnnnnnnnnnnnnnnnnnnnnnnnnnnnnnnnnnnnnnnnnnnnnnnnnnnnnnnnnnnnnnnnnnnnnnnnnnnnnnnnnnnnnnnnnnnnnnnnnnnnnnnnnnnnnnnnnnnnnnnnnnnnnnnnnnnnnnnnnnnnnnnnnnnnnnnnnnnnnnnnnnnnnnnnnnnnnnnnnnnnnnnnnnnnnnnnnnnnnnnnnnnnnnnnnnnnnnnnnnnnnnnnnnnnnnnnnnnnnnnnnnnnnnnnnnnnnnnnnnnnnnnnnnnnnnnnnnnnnnnnnnnnnnnnnnnnnnnnnnnnnnnnnnnnnnnnnnnnnnnnnnnnnnnnnnnnnnnnnnnnnnnnnnnnnnnnnnnnnnnnnnnnnnnnnnnnnnnnnnnnnnnnnnnnnnnnnnnnnnnnnnnnnnnnnnnnnnnnnnnnnnnnnnnnnnnnnnnnnnnnnnnnnnnnnnnnnnnnnnnnnnnnnnnnnnnnnnnnnnnnnnnnnnnnnnnnnnnnnnnnnnnnnnnnnnnnnnnnnnnnnnnnnnnnnnnnnnnnnnnnnnnnnnnnnnnnnnnnnnnnnnnnnnnnnnnnnnnnnnnnnnnnnnnnnnnnnnnnnnnnnnnnnnnnnnnnnnnnnnnnnnnnnnnnnnnnnnnnnnnnnnnnnnnnnnnnnnnnnnnnnnnnnnnnnnnnnnnnnnnnnnnnnnnnnnnnnnnnnnnnnnnnnnnnnnnnnnnnnnnnnnnnnnnnnnnnnnnnnnnnnnnnnnnnnnnnnnnnnnnnnnnnnnnnnnnnnnnnnnnnnnnnnnnnnnnnnnnnnnnnnnnnnnnnnnnnnnnnnnnnnnnnnnnnnnnnnnnnnnnnnnnnnnnnnnnnnnnnnnnnnnnnnnnnnnnnnnnnnnnnnnnnnnnnnnnnnnnnnnnnnnnnnnnnnnnnnnnnnnnnnnnnnnnnnnnnnnnnnnnnnnnnnnnnnnnnnnnnnnnnnnnnnnnnnnnnnnnnnnnnnnnnnnnnnnnnnnnnnnnnnnnnnnnnnnnnnnnnnnnnnnnnnnnnnnnnnnnnnnnnnnnnnnnnnnnnnnnnnnnnnnnnnnnnnnnnnnnnnnnnnnnnnnnnnnnnnnnnnnnnnnnnnnnnnnnnnnnnnnnnnnnnnnnnnnnnnnnnnnnnnnnnnnnnnnnnnnnnnnnnnnnnnnnnnnnnnnnnnnnnnnnnnnnnnnnnnnnnnnnnnnnnnnnnnnnnnnnnnnnnnnnnnnnnnnnnnnnnnnnnnnnnnnnnnnnnnnnnnnnnnnnnnnnnnnnnnnnnnnnnnnnnnnnnnnnnnnnnnnnnnnnnnnnnnnnnnnnnnnnnnnnnnnnnnnnnnnnnnnnnnnnnnnnnnnnnnnnnnnnnnnnnnnnnnnnnnnnnnnnnnnnnnnnnnnnnnnnnnnnnnnnnnnnnnnnnnnnnnnnnnnnnnnnnnnnnnnnnnnnnnnnnnnnnnnnnnnnnnnnnnnnnnnnnnnnnnnnnnnnnnnnnnnnnnnnnnnnnnnnnnnnnnnnnnnnnnnnnnnnnnnnnnnnnnnnnnnnnnnnnnnnnnnnnnnnnnnnnnnnnnnnnnnnnnnnnnnnnnnnnnnnnnnnnnnnnnnnnnnnnnnnnnnnnnnnnnnnnnnnnnnnnnnnnnnnnnnnnnnnnnnnnnnnnnnnnnnnnnnnnnnnnnnnnnnnnnnnnnnnnnnnnnnnnnnnnnnnnnnnnnnnnnnnnnnnnnnnnnnnnnnnnnnnnnnnnnnnnnnnnnnnnnnnnnnnnnnnnnnnnnnnnnnnnnnnnnnnnnnnnnnnnnnnnnnnnnnnnnnnnnnnnnnnnnnnnnnnnnnnnnnnnnnnnnnnnnnnnnnnnnnnnnnnnnnnnnnnnnnnnnnnnnnnnnnnnnnnnnnnnnnnnnnnnnnnnnnnnnnnnnnnnnnnnnnnnnnnnnnnnnnnnnnnnnnnnnnnnnnnnnnnnnnnnnnnnnnnnnnnnnnnnnnnnnnnnnnnnnnnnnnnnnnnnnnnnnnnnnnnnnnnnnnnnnnnnnnnnnnnnnnnnnnnnnnnnnnnnnnnnnnnnnnnnnnnnnnnnnnnnnnnnnnnnnnnnnnnnnnnnnnnnnnnnnnnnnnnnnnnnnnnnnnnnnnnnnnnnnnnnnnnnnnnnnnnnnnnnnnnnnnnnnnnnnnnnnnnnnnnnnnnnnnnnnnnnnnnnnnnnnnnnnnnnnnnnnnnnnnnnnnnnnnnnnnnnnnnnnnnnnnnnnnnnnnnnnnnnnnnnnnnnnnnnnnnnnnnnnnnnnnnnnnnnnnnnnnnnnnnnnnnnnnnnnnnnnnnnnnnnnnnnnnnnnnnnnnnnnnnnnnnnnnnnnnnnnnnnnnnnnnnnnnnnnnnnnnnnnnnnnnnnnnnnnnnnnnnnnnnnnnnnnnnnnnnnnnnnnnnnnnnnnnnnnnnnnnnnnnnnnnnnnnnnnnnnnnnnnnnnnnnnnnnnnnnnnnnnnnnnnnnnnnnnnnnnnnnnnnnnnnnnnnnnnnnnnnnnnnnnnnnnnnnnnnnnnnnnnnnnnnnnnnnnnnnnnnnnnnnnnnnnnnnnnnnnnnnnnnnnnnnnnnnnnnnnnnnnnnnnnnnnnnnnnnnnnnnnnnnnnnnnnnnnnnnnnnnnnnnnnnnnnnnnnnnnnnnnnnnnnnnnnnnnnnnnnnnnnnnnnnnnnnnnnnnnnnnnnnnnnnnnnnnnnnnnnnnnnnnnnnnnnnnnnnnnnnnnnnnnnnnnnnnnnnnnnnnnnnnnnnnnnnnnnnnnnnnnnnnnnnnnnnnnnnnnnnnnnnnnnnnnnnnnnnnnnnnnnnnnnnnnnnnnnnnnnnnnnnnnnnnnnnnnnnnnnnnnnnnnnnnnnnnnnnnnnnnnnnnnnnnnnnnnnnnnnnnnnnnnnnnnnnnnnnnnnnnnnnnnnnnnnnnnnnnnnnnnnnnnnnnnnnnnnnnnnnnnnnnnnnnnnnnnnnnnnnnnnnnnnnnnnnnnnnnnnnnnnnnnnnnnnnnnnnnnnnnnnnnnnnnnnnnnnnnnnnnnnnnnnnnnnnnnnnnnnnnnnnnnnnnnnnnnnnnnnnnnnnnnnnnnnnnnnnnnnnnnnnnnnnnnnnnnnnnnnnnnnnnnnnnnnnnnnnnnnnnnnnnnnnnnnnnnnnnnnnnnnnnnnnnnnnnnnnnnnnnnnnnnnnnnnnnnnnnnnnnnnnnnnnnnnnnnnnnnnnnnnnnnnnnnnnnnnnnnnnnnnnnnnnnnnnnnnnnnnnnnnnnnnnnnnnnnnnnnnnnnnnnnnnnnnnnnnnnnnnnnnnnnnnnnnnnnnnnnnnnnnnnnnnnnnnnnnnnnnnnnnnnnnnnnnnnnnnnnnnnnnnnnnnnnnnnnnnnnnnnnnnnnnnnnnnnnnnnnnnnnnnnnnnnnnnnnnnnnnnnnnnnnnnnnnnnnnnnnnnnnnnnnnnnnnnnnnnnnnnnnnnnnnnnnnnnnnnnnnnnnnnnnnnnnnnnnnnnnnnnnnnnnnnnnnnnnnnnnnnnnnnnnnnnnnnnnnnnnnnnnnnnnnnnnnnnnnnnnnnnnnnnnnnnnnnnnnnnnnnnnnnnnnnnnnnnnnnnnnnnnnnnnnnnnnnnnnnnnnnnnnnnnnnnnnnnnnnnnnnnnnnnnnnnnnnnnnnnnnnnnnnnnnnnnnnnnnnnnnnnnnnnnnnnnnnnnnnnnnnnnnnnnnnnnnnnnnnnnnnnnnnnnnnnnnnnnnnnnnnnnnnnnnnnnnnnnnnnnnnnnnnnnnnnnnnnnnnnnnnnnnnnnnnnnnnnnnnnnnnnnnnnnnnnnnnnnnnnnnnnnnnnnnnnnnnnnnnnnnnnnnnnnnnnnnnnnnnnnnnnnnnnnnnnnnnnnnnnnnnnnnnnnnnnnnnnnnnnnnnnnnnnnnnnnnnnnnnnnnnnnnnnnnnnnnnnnnnnnnnnnnnnnnnnnnnnnnnnnnnnnnnnnnnnnnnnnnnnnnnnnnnnnnnnnnnnnnnnnnnnnnnnnnnnnnnnnnnnnnnnnnnnnnnnnnnnnnnnnnnnnnnnnnnnnnnnnnnnnnnnnnnnnnnnnnnnnnnnnnnnnnnnnnnnnnnnnnnnnnnnnnnnnnnnnnnnnnnnnnnnnnnnnnnnnnnnnnnnnnnnnnnnnnnnnnnnnnnnnnnnnnnnnnnnnnnnnnnnnnnnnnnnnnnnnnnnnnnnnnnnnnnnnnnnnnnnnnnnnnnnnnnnnnnnnnnnnnnnnnnnnnnnnnnnnnnnnnnnnnnnnnnnnnnnnnnnnnnnnnnnnnnnnnnnnnnnnnnnnnnnnnnnnnnnnnnnnnnnnnnnnnnnnnnnnnnnnnnnnnnnnnnnnnnnnnnnnnnnnnnnnnnnnnnnnnnnnnnnnnnnnnnnnnnnnnnnnnnnnnnnnnnnnnnnnnnnnnnnnnnnnnnnnnnnnnnnnnnnnnnnnnnnnnnnnnnnnnnnnnnnnnnnnnnnnnnnnnnnnnnnnnnnnnnnnnnnnnnnnnnnnnnnnnnnnnnnnnnnnnnnnnnnnnnnnnnnnnnnnnnnnnnnnnnnnnnnnnnnnnnnnnnnnnnnnnnnnnnnnnnnnnnnnnnnnnnnnnnnnnnnnnnnnnnnnnnnnnnnnnnnnnnnnnnnnnnnnnnnnnnnnnnnnnnnnnnnnnnnnnnnnnnnnnnnnnnnnnnnnnnnnnnnnnnnnnnnnnnnnnnnnnnnnnnnnnnnnnnnnnnnnnnnnnnnnnnnnnnnnnnnnnnnnnnnnnnnnnnnnnnnnnnnnnnnnnnnnnnnnnnnnnnnnnnnnnnnnnnnnnnnnnnnnnnnnnnnnnnnnnnnnnnnnnnnnnnnnnnnnnnnnnnnnnnnnnnnnnnnnnnnnnnnnnnnnnnnnnnnnnnnnnnnnnnnnnnnnnnnnnnnnnnnnnnnnnnnnnnnnnnnnnnnnnnnnnnnnnnnnnnnnnnnnnnnnnnnnnnnnnnnnnnnnnnnnnnnnnnnnnnnnnnnnnnnnnnnnnnnnnnnnnnnnnnnnnnnnnnnnnnnnnnnnnnnnnnnnnnnnnnnnnnnnnnnnnnnnnnnnnnnnnnnnnnnnnnnnnnnnnnnnnnnnnnnnnnnnnnnnnnnnnnnnnnnnnnnnnnnnnnnnnnnnnnnnnnnnnnnnnnnnnnnnnnnnnnnnnnnnnnnnnnnnnnnnnnnnnnnnnnnnnnnnnnnnnnnnnnnnnnnnnnnnnnnnnnnnnnnnnnnnnnnnnnnnnnnnnnnnnnnnnnnnnnnnnnnnnnnnnnnnnnnnnnnnnnnnnnnnnnnnnnnnnnnnnnnnnnnnnnnnnnnnnnnnnnnnnnnnnnnnnnnnnnnnnnnnnnnnnnnnnnnnnnnnnnnnnnnnnnnnnnnnnnnnnnnnnnnnnnnnnnnnnnnnnnnnnnnnnnnnnnnnnnnnnnnnnnnnnnnnnnnnnnnnnnnnnnnnnnnnnnnnnnnnnnnnnnnnnnnnnnnnnnnnnnnnnnnnnnnnnnnnnnnnnnnnnnnnnnnnnnnnnnnnnnnnnnnnnnnnnnnnnnnnnnnnnnnnnnnnnnnnnnnnnnnnnnnnnnnnnnnnnnnnnnnnnnnnnnnnnnnnnnnnnnnnnnnnnnnnnnnnnnnnnnnnnnnnnnnnnnnnnnnnnnnnnnnnnnnnnnnnnnnnnnnnnnnnnnnnnnnnnnnnnnnnnnnnnnnnnnnnnnnnnnnnnnnnnnnnnnnnnnnnnnnnnnnnnnnnnnnnnnnnnnnnnnnnnnnnnnnnnnnnnnnnnnnnnnnnnnnnnnnnnnnnnnnnnnnnnnnnnnnnnnnnnnnnnnnnnnnnnnnnnnnnnnnnnnnnnnnnnnnnnnnnnnnnnnnnnnnnnnnnnnnnnnnnnnnnnnnnnnnnnnnnnnnnnnnnnnnnnnnnnnnnnnnnnnnnnnnnnnnnnnnnnnnnnnnnnnnnnnnnnnnnnnnnnnnnnnnnnnnnnnnnnnnnnnnnnnnnnnnnnnnnnnnnnnnnnnnnnnnnnnnnnnnnnnnnnnnnnnnnnnnnnnnnnnnnnnnnnnnnnnnnnnnnnnnnnnnnnnnnnnnnnnnnnnnnnnnnnnnnnnnnnnnnnnnnnnnnnnnnnnnnnnnnnnnnnnnnnnnnnnnnnnnnnnnnnnnnnnnnnnnnnnnnnnnnnnnnnnnnnnnnnnnnnnnnnnnnnnnnnnnnnnnnnnnnnnnnnnnnnnnnnnnnnnnnnnnnnnnnnnnnnnnnnnnnnnnnnnnnnnnnnnnnnnnnnnnnnnnnnnnnnnnnnnnnnnnnnnnnnnnnnnnnnnnnnnnnnnnnnnnnnnnnnnnnnnnnnnnnnnnnnnnnnnnnnnnnnnnnnnnnnnnnnnnnnnnnnnnnnnnnnnnnnnnnnnnnnnnnnnnnnnnnnnnnnnnnnnnnnnnnnnnnnnnnnnnnnnnnnnnnnnnnnnnnnnnnnnnnnnnnnnnnnnnnnnnnnnnnnnnnnnnnnnnnnnnnnnnnnnnnnnnnnnnnnnnnnnnnnnnnnnnnnnnnnnnnnnnnnnnnnnnnnnnnnnnnnnnnnnnnnnnnnnnnnnnnnnnnnnnnnnnnnnnnnnnnnnnnnnnnnnnnnnnnnnnnnnnnnnnnnnnnnnnnnnnnnnnnnnnnnnnnnnnnnnnnnnnnnnnnnnnnnnnnnnnnnnnnnnnnnnnnnnnnnnnnnnnnnnnnnnnnnnnnnnnnnnnnnnnnnnnnnnnnnnnnnnnnnnnnnnnnnnnnnnnnnnnnnnnnnnnnnnnnnnnnnnnnnnnnnnnnnnnnnnnnnnnnnnnnnnnnnnnnnnnnnnnnnnnnnnnnnnnnnnnnnnnnnnnnnnnnnnnnnnnnnnnnnnnnnnnnnnnnnnnnnnnnnnnnnnnnnnnnnnnnnnnnnnnnnnnnnnnnnnnnnnnnnnnnnnnnnnnnnnnnnnnnnnnnnnnnnnnnnnnnnnnnnnnnnnnnnnnnnnnnnnnnnnnnnnnnnnnnnnnnnnnnnnnnnnnnnnnnnnnnnnnnnnnnnnnnnnnnnnnnnnnnnnnnnnnnnnnnnnnnnnnnnnnnnnnnnnnnnnnnnnnnnnnnnnnnnnnnnnnnnnnnnnnnnnnnnnnnnnnnnnnnnnnnnnnnnnnnnnnnnnnnnnnnnnnnnnnnnnnnnnnnnnnnnnnnnnnnnnnnnnnnnnnnnnnnnnnnnnnnnnnnnnnnnnnnnnnnnnnnnnnnnnnnnnnnnnnnnnnnnnnnnnnnnnnnnnnnnnnnnnnnnnnnnnnnnnnnnnnnnnnnnnnnnnnnnnnnnnnnnnnnnnnnnnnnnnnnnnnnnnnnnnnnnnnnnnnnnnnnnnnnnnnnnnnnnnnnnnnnnnnnnnnnnnnnnnnnnnnnnnnnnnnnnnnnnnnnnnnnnnnnnnnnnnnnnnnnnnnnnnnnnnnnnnnnnnnnnnnnnnnnnnnnnnnnnnnnnnnnnnnnnnnnnnnnnnnnnnnnnnnnnnnnnnnnnnnnnnnnnnnnnnnnnnnnnnnnnnnnnnnnnnnnnnnnnnnnnnnnnnnnnnnnnnnnnnnnnnnnnnnnnnnnnnnnnnnnnnnnnnnnnnnnnnnnnnnnnnnnnnnnnnnnnnnnnnnnnnnnnnnnnnnnnnnnnnnnnnnnnnnnnnnnnnnnnnnnnnnnnnnnnnnnnnnnnnnnnnnnnnnnnnnnnnnnnnnnnnnnnnnnnnnnnnnnnnnnnnnnnnnnnnnnnnnnnnnnnnnnnnnnnnnnnnnnnnnnnnnnnnnnnnnnnnnnnnnnnnnnnnnnnnnnnnnnnnnnnnnnnnnnnnnnnnnnnnnnnnnnnnnnnnnnnnnnnnnnnnnnnnnnnnnnnnnnnnnnnnnnnnnnnnnnnnnnnnnnnnnnnnnnnnnnnnnnnnnnnnnnnnnnnnnnnnnnnnnnnnnnnnnnnnnnnnnnnnnnnnnnnnnnnnnnnnnnnnnnnnnnnnnnnnnnnnnnnnnnnnnnnnnnnnnnnnnnnnnnnnnnnnnnnnnnnnnnnnnnnnnnnnnnnnnnnnnnnnnnnnnnnnnnnnnnnnnnnnnnnnnnnnnnnnnnnnnnnnnnnnnnnnnnnnnnnnnnnnnnnnnnnnnnnnnnnnnnnnnnnnnnnnnnnnnnnnnnnnnnnnnnnnnnnnnnnnnnnnnnnnnnnnnnnnnnnnnnnnnnnnnnnnnnnnnnnnnnnnnnnnnnnnnnnnnnnnnnnnnnnnnnnnnnnnnnnnnnnnnnnnnnnnnnnnnnnnnnnnnnnnnnnnnnnnnnnnnnnnnnnnnnnnnnnnnnnnnnnnnnnnnnnnnnnnnnnnnnnnnnnnnnnnnnnnnnnnnnnnnnnnnnnnnnnnnnnnnnnnnnnnnnnnnnnnnnnnnnnnnnnnnnnnnnnnnnnnnnnnnnnnnnnnnnnnnnnnnnnnnnnnnnnnnnnnnnnnnnnnnnnnnnnnnnnnnnnnnnnnnnnnnnnnnnnnnnnnnnnnnnnnnnnnnnnnnnnnnnnnnnnnnnnnnnnnnnnnnnnnnnnnnnnnnnnnnnnnnnnnnnnnnnnnnnnnnnnnnnnnnnnnnnnnnnnnnnnnnnnnnnnnnnnnnnnnnnnnnnnnnnnnnnnnnnnnnnnnnnnnnnnnnnnnnnnnnnnnnnnnnnnnnnnnnnnnnnnnnnnnnnnnnnnnnnnnnnnnnnnnnnnnnnnnnnnnnnnnnnnnnnnnnnnnnnnnnnnnnnnnnnnnnnnnnnnnnnnnnnnnnnnnnnnnnnnnnnnnnnnnnnnnnnnnnnnnnnnnnnnnnnnnnnnnnnnnnnnnnnnnnnnnnnnnnnnnnnnnnnnnnnnnnnnnnnnnnnnnnnnnnnnnnnnnnnnnnnnnnnnnnnnnnnnnnnnnnnnnnnnnnnnnnnnnnnnnnnnnnnnnnnnnnnnnnnnnnnnnnnnnnnnnnnnnnnnnnnnnnnnnnnnnnnnnnnnnnnnnnnnnnnnnnnnnnnnnnnnnnnnnnnnnnnnnnnnnnnnnnnnnnnnnnnnnnnnnnnnnnnnnnnnnnnnnnnnnnnnnnnnnnnnnnnnnnnnnnnnnnnnnnnnnnnnnnnnnnnnnnnnnnnnnnnnnnnnnnnnnnnnnnnnnnnnnnnnnnnnnnnnnnnnnnnnnnnnnnnnnnnnnnnnnnnnnnnnnnnnnnnnnnnnnnnnnnnnnnnnnnnnnnnnnnnnnnnnnnnnnnnnnnnnnnnnnnnnnnnnnnnnnnnnnnnnnnnnnnnnnnnnnnnnnnnnnnnnnnnnnnnnnnnnnnnnnnnnnnnnnnnnnnnnnnnnnnnnnnnnnnnnnnnnnnnnnnnnnnnnnnnnnnnnnnnnnnnnnnnnnnnnnnnnnnnnnnnnnnnnnnnnnnnnnnnnnnnnnnnnnnnnnnnnnnnnnnnnnnnnnnnnnnnnnnnnnnnnnnnnnnnnnnnnnnnnnnnnnnnnnnnnnnnnnnnnnnnnnnnnnnnnnnnnnnnnnnnnnnnnnnnnnnnnnnnnnnnnnnnnnnnnnnnnnnnnnnnnnnnnnnnnnnnnnnnnnnnnnnnnnnnnnnnnnnnnnnnnnnnnnnnnnnnnnnnnnnnnnnnnnnnnnnnnnnnnnnnnnnnnnnnnnnnnnnnnnnnnnnnnnnnnnnnnnnnnnnnnnnnnnnnnnnnnnnnnnnnnnnnnnnnnnnnnnnnnnnnnnnnnnnnnnnnnnnnnnnnnnnnnnnnnnnnnnnnnnnnnnnnnnnnnnnnnnnnnnnnnnnnnnnnnnnnnnnnnnnnnnnnnnnnnnnnnnnnnnnnnnnnnnnnnnnnnnnnnnnnnnnnnnnnnnnnnnnnnnnnnnnnnnnnnnnnnnnnnnnnnnnnnnnnnnnnnnnnnnnnnnnnnnnnnnnnnnnnnnnnnnnnnnnnnnnnnnnnnnnnnnnnnnnnnnnnnnnnnnnnnnnnnnnnnnnnnnnnnnnnnnnnnnnnnnnnnnnnnnnnnnnnnnnnnnnnnnnnnnnnnnnnnnnnnnnnnnnnnnnnnnnnnnnnnnnnnnnnnnnnnnnnnnnnnnnnnnnnnnnnnnnnnnnnnnnnnnnnnnnnnnnnnnnnnnnnnnncctccccgccggaagtgcggtcagaggctaatatatcatagctgtatagataagacaagaaaatttcttaatttttcgattttcttgattttgtcacagcttctttttgtcgggatgtatgcgccacagggacgatatattgttggggtgggttctacgacatgaacatctggagccccaagaagcgagacgagaaattgaatcacaggcgcgacaatcccgtcaaacgagtgctggtcaagcacccgggcgactggccgtggtcgcgctgcggcgggaggttctatttctggaatgatggttcgatcttgagcatggacaagaggctatgaaggtgtcgacatgccgaggggcgcatacatcccgacaaaaacccgtcgggacgtatgcgccacccgcgaaatcgatcgcaagattccctccgaatcggaacgccgcggaggcatcaaagcttctgcgcttagtcaacggcgcgccttgcagcctgtgaagtgtgggctaagcggacgcgataaccgttgtcgtggtcttcgggccttgcctttgccgcgtcccgggtgtataccttcgccatgattgtcctgtggtagctacgcagcggacggtccggtccccccggggcgcgacgggcctgccacccgcctcttgcccaggcaaggaggaagccgtggagtacaacctgctcgaagaaaagtggattcccgttctgtggaaagatgggcacagcggtcgcgtgggcattagtgaggcccttaggcaagcaggccggattcgccaaatcgcggccagcaacccaatggaccgcctggccatcctgcgtttcctgcttgcgttgctctattggtgcaaagggaatcccccggacgacaagaactcgatttcttcgtttccctctgattggttcaagaaactcgatgacaacaaagactgtttcaaccttcagggcgatgggaagcggttttaccaacgcaagcctaaccgacttgagaagaagctgtccgtcaactatctgatgcaagaagtgccgaccggcacaaacttctggcacttccggcatgggacagatttcagaaacggcttatgtccggcatgctgcgcaatgggcttgttgcgccttccgctctttgctacgtcggccgggcgcggcaagcccccgggcgtcaatcaaaaaccgccgatctacatcgtgccgatgggcgactgcctttccgaaaccctgcgcctctcatggcggaagacgtcggagatgaacctgggcacgcccacatgggaaaatccggacataagcctccctcaacacggcaatgttccattattgataggattaacgtgggtaccgcggcgcgtctggttagacactccggagacaccagagtccaactgcatcgcctgcgggcgcagggaggctctgatacgtcaatgtgtctttgcgggtattgggagcacaaagacaggcgaaggcagtctggcacgaatctggaacgacccgcacaccatcagcgaaggcgacgagattgtgaagcctttcagcgcgcttggcccggccgacgctgcggctgggaagtggacgaaggtcgtggcgggaatcctgtgcggggaaaagccgaaggggaacagtaagttgtgggtcgtcagctttgcgacagtgcagaacgacaaatacctggaagcagccgagcgggagattcaattcttggccgcgctcgacgacgtgaaggttcaggcgagtttgcaagaaatccaggcgtggcagaaggaaggctggaagctcgttggcagagccaaaccgcgagagacttcacgaaacagaggacaccttgaaattctctccgcagtcgccgctgttcgtccccaagccgaggcaacggtttccggaaaaatcgacgagatgatcgcagaaggcggtaaggcatgggaagaggcggcccaggaatatcgtccgttgatggccgccgtcgccaaatcgctttccccgggctacacaaccgcttccctccggaggcgacaagaaattgccgctgtaaagccggacatgcggccaaagagaaacaacaaagacgaagggggggacaagtgactccaacggagcagtacgtcgaagttctgactcgactgaaacccggtgagctcgggctcttgcgcaaccatgccgggcaagggctcgacgaatcggtagagggctttgaccttttcgcaggcctttggtggccgctgcgggcgcaaacccaacgggcgcctcgccgtgaggtggcctggcttgtcgccaaactctacgccctccggcccctcgagcattcaccccgcgagaccctcgctcgccagctcgggcgatcccggccgggcgagaaaacagcgcggcagcgtttcgagcaacgcttcgacaggatgctcacgctgccgcttgctgaaatcgaacccgccctacagtgggcaatcgacctcatagcttccaagcacctcgaactcgactgggtgcggctgacgaacgatctttccatctgggaacgcgaatccacccggctcaaatgggccgaggaatttttgaactgtccaagaggaggagagtcatgttgatccagattcacgccattcagaatcacagcccggccaacctgaaccgggatgacctgggcgcgcccaagacttgcttttttggcggagtcttgcgctcccgtatttccagccagtgccttaagcgcagcatccgcatgagtgaggagttcagacaattgctgggcggagttcgcacccgccagttggcgaaagagattgcggaaaaggtgacgggcaaagacgtcaggaagcgagcggagaacattctcaaagcctgcgggctggagcctaagaaagcaaaaaaacaggaaggagaagacgaacaggaaagtgctgagaggagcaagatgctggtttacaccacccaagaggcgattacacgcatggccgaactcctccagcagggcgacggaaaaacggacgaggccttggcagcggagttcggcaagctcatcagtgaatccgtcgccgtgccggacatggcgctgagcggcaggatgcttgaaacgggagtcctcaaagacacgacggttgaggcatcgcttcaagtcgcccatgccatttccacccatgaggcccggcccgaggtggactactatgtcgccgccgatgatgtccccggcgaggacgcgggcgcaggttacgtggatgaagccatgttcggttcggcatgtttctacaagtatttctccattcattgggaaacgctggtcaaaaacctgaagcccttcgggacgaatcacgaaaaactggcggcccataccgtcggcgccttcattcgcgccgcggccttggccaaccccacgggaaaacaaaatagttttgccgcgcacaaccctcctgacgggatgttggtggaagtcagaaacactcccatcagctacgccaacgccttcgccaaaccggcggctcctcagggcgaacgggacatcatctcgcagagcgtggcgcagcttgcccattatgtgaacgacatagatacgggatacggcaagccgacgaagcggttctggttctctccaaatctccgctatccgttgacggctaccaccacggagagcgaagacggaaaacagaaacagcgtgaggtcccgcttgccgacaaagatgttaagtctcttgacgaactgatagcggctgtactcaaggaaatcggttacgactggcaggaggccaagaaagtggtcctgaatccggaggtgccccatgagcgcaaagacgctgctacttcggcttgaaggtcctcttcaggcatggggcgatcagcaatccaagttcgtcattcggcgcacggccgaggcgccgaccaagtccggcgtcatcgggatgctttgcgcggcattgggcgtttcccggccagaggcccgcgaaggctggcttccaaggctggcccggctgcgcatgggcgtacgcgtcgatgcgccaggggtccgctggtgggattatcacacggtgggtgcggggatgccgatgcgtaccgccgaggggggaaccaagtccggagccatgctcacccgccgcgaatacctttgcgacgcctcgtttctcgtcgctcttcagggcgaaccggacctcattgaggaactggaggcggcaatcaaagcgcccaagtggacactctacctcggcagaaagtgctgccccccttgccgccctctgctggagcatccgggaggtgaattccccgacttgctttctgccctcgaatcggtcccctggcgtcggcggctgaaggacgatccccagccgcgacccgtcgattgcctgcttgattgggaacccaccaacgagcagcccgaggcgcccgatgatgcgctcgtctggtacgacgtgccgttgacattcgagccgccgtcgcaccaaccccgattcgtcatccgcaggcagttgcgcgtcggagcggacggcgacgtaacacttgcggtgcagccaccgcagagcgacacgccaccgcctccgcgcccaagagcggattacacgaacacagagtacaaaaaccgacgcaaggagcggctcgacgacgactatcacttgtgcgttttttgcaagtctcccgccagcaccgtgcagcacatcacgtaccgccgcgcgggcggcggcgaactccgggacgatttgcgctccctctgccgcctctgccacgacgccgtgaccatgatcgagtacgggctcggaatgggcttggaccgcatcaaccccgaagagccccgttggcgcgacaagatcatcgagaagcgggaagagattatcaggttccgctctctggagactcgccgcagacgccttgccgctgaggaggtggaatagccatgtacctctcctgcctcttgattgacgtcggcaccaaccccgaccgccccaggcccgggcggctctggctgcgaaacctccatcacgtccaccagcgcctttgcatggcgtttccatccaaagaccgaatatcccacgatccccacttcctcaagcctttcaaacccgcggactttgccaacaaccaggtccatgtaagacgtgacggcgactccggctttctcttccgcatcgacccgcaaccgggcgggcgggtcgtgatcctcgtccagtctaactctgccgtaaagcctgactggggctacgccttccacaacgcccgttttcttctgaatcctctagccgctccccctcaggtgcaggaattcgacccccgctttgagaagggtcagcggcttcgcttccgtatccgcgccaatctgagtaagaagataaaaaccagcacagagggcgttgatcttacgaggacgcgagaggggacagataagcggggccgcccgaaggcccaaggcaaacgcgtggcgctgacctgggacaaggaccagaaccgcgacgatgtgatacgaaaatggttcgccggcaagggcggccaaggtggattccaagtggaaactttccgggtcttgcagatcgggtggggcgcaggagaccgatccgacccgaggccgacgggcggccgcatgaaatttcgctcggcgttattggaggggacgcttacggttgaggacgcggacagcttcagagaaaccatcgtgggcggcgttgggcacggcaaagccttcggcttcggcctgctttccgtggcgccgctctcgctgtagcggcggtctccgaccgccggtacgtcgatcggagatcgacgctacaatcccttgtcgatcggggatccgtgcaacatttcttgagcggagatcgagccaatatgaaattcaaaccccgcttgcggcgactggactggctctatacgggcagcccaatctactatctcacgctgtgtacgcaggaccgcaaacgctcgttggcaaatcctgcgattcaccgggaattcacgagattctccgaacgggcgagcgattttcttgtttgggtcgggttcttcatgatcatgcctgatcacatccatcttttcgccggcttttgtcgtgagtccccacctttagggaaatggatcaaggcgctgcgcggggatttatccaaagtcctccgggaagatgagggcgagggcacacattgggagaaagactttttcgatcacgtcctgagatcgcaagaatcctatcgggagaaatatgaatatgtccggcagaatccggtccgggccggtttagtcaagcgcccggaagattggccgtaccagggtgagatccatcgcctggttttgtagcggcggtctccgaccgccgtaacgtcgatcggagatcgactacaaccccggtcgatcggagatcgacgctacaaccgccgtcgatcggagatcgacgctacagcacgggctggaggctctgtgagaattcaagatctccacgttctacccaagttcagtgacgggtggagttatctgtacgtcgagcattgccacgtcgatcaggaagagcgggccattgccgtccacgatcaagccgggaaggtgccggtcccctgtgccaatctggctctcctgatgttgggtccgggcgtctcgattactcacgccgccatctccgtgttggcggaccatgggtgcctggtggcttggtgcggggaggagggagtccgcttctacgccgtgggcatgggcgagacgcgcaacgcggccaacttcctgcatcaggcgaggctgtgggcggaccagggtttccatatgcaggtggtgcgccgcctctatcagttgcgattttcggagaagttcgaccctgccctgaccctccagcaaatccgcggcatggagggcgtgcgggtgcgcgatgcctacgccaaggccgcccaggaagccggcatcacgtggtcgggccgcagctataaacgcgatgagtggagcaaggcggaccctgccaaccgagccttgtccgccgctaactcctgcctatatggaatctgccatgctgccatcgtgtcagcaggtttttcgcccgcactcgggtttatccacaccggcaagatgctgtccttcgtctacgatctcgccgacctgtacaaggctgaaattaccgttccagtggcatttcgcgccgccgccgaggggacgggacagttggaacgccgggtgcgcatcacctgccgcgatcagttcgtatccacgcggcttctggagagaatcatcccggatgtccaaagggcgttgatgctggcaaaagcgacggcctgggacactaccttcgacctggatgccgccgcccccggcttcctctgggacaatctggaaggagaggtcgaaggcggccgcctgctagcccccgaaatcggtgaaacggagcccggcgatggtggtcctgattcttgagcgcgtccccccagggttgcgaggcgagctgactcgctggtttttggaacctcaggcgggagtgttcgtgggacgcgtctccgccatggtccgtgatcggctctgggaaaaagcctgcagccaggccaagggaggcgggtgcttgattatctattcaagcgacaatgaacagggctttcgagtccgaacctggggccaaacagctcgggtcatcgatgacttcgagggcctttttctcgttcgcatgccgcagaatcaataatttagtaagtgttgtccccacgcgcgtgggggtgaaccgccggggctgaaggtttcatgggctggaaagaagttgtccccacgcgcgtgggggtgaaccgatatgctgcatgtgccggggctggcgcttgatgttgtccccacgcgcgtgggggtgaaccggtatcggcgagtggcaaggcgaatccacttaggttgtccccacgcgcgtgggggtgaaccgacctccgagggcgcggggcgcgtgctggcgatgttgtccccacgcgcgtgggggtgaaccggctggggccgacgcgcgcttgtgagactgcgggttgtccccacgcgcgtgggggtgaaccgcgggagaactttgaaggcacggtcctcgatcacgttgtccccacgcgcgtgggggtgaaccggcgcaggttaaggctgaggccaaggccgatgcgttgtccccacgcgcgtgggggtgaaccgtaatggtggcttgcaccttctgctcgaccgatgttgtccccacgcgcgtgggggtgaaccgcagcgggccgtgttggaggagaaggtcgcggagttgtccccacgcgcgtgggggtgaaccgttcccagccgcaggcaggatcaccgtaccccagttgtccccacgcgcgtgggggtgaaccgcaaaacaatatcaagaccaagcacttggatgtgttgtccccacgcgcgtgggggtgaaccgcatcgggcagcacagcggccttataccccaaagttgtccccacgcgcgtgggggtgaaccggcagctcgcggcgattcgcattgccgctgaaagttgtccccacgcgcgtgggggtgaaccggggagtcgtgagtgtagttacaggcagggttcgttgtccccacgcgcgtgggggtgaaccgcttctgcatcttataaagaacgccagtttgaagttgtccccacgcgcgtgggggtgaaccggtacggttcccaggggaattatttcttggggtgttgtccccacgcgcgtgggggtgaaccgatgtagcttgatatgggtgtggtgtcgcagaagttgtccccacgcgcgtgggggtgaaccggcggcgcgcacattccaacctcgtccgtatccgttgtccccacgcgcgtgggggtgaaccggcggacacggcggatgtgacgaatatggagtcgttgtccccacgcgcgtgggggtgaaccggtctctcgaaaaggaaagccaactttcagcttgttgtccccacgcgcgtgggggtgaaccgctcttggcatagagcttagtgagtttgatgaagttgtccccacgcgcgtgggggtgaaccgcctttgccctccgagacgcaacagctccattcgttgtccccacgcgcgtgggggtgaaccggcgagcgcaggtctaagcgaccgcgacaaagagttgtccccacgcgcgtgggggtgaaccggtgatggacacttcctaaaatggcattaagtcgttgtccccacgcgcgtgggggtgaaccgcagcgggtagcgcagacttcgtgcatatcgaagtctgcggcttttgccgccgtgaatcttgaaaagccgcagacctgcaaaaagcgcaggtctgcgctacccactgcctggccatcctggagaattgaaagtccctccagtaaagcggcgaagcgcaggatttccggctgcttcaatcgcttgcgacgctcaccggtcagtagcgcgttggtaatttcgagcccccatacggctggaacaacgagcgtctgcccttcagtgccaccaggaccccgtccgcgtattcgctcgcttcatccggggagcaccaggcaagcgccaccgacgcatgcaccacaacgccgctcaaaatcgccgtccctcaattatcatttcgcggacgctcatggtgtggggctttacgcgcttgcgcaacgcgcgcatgccctcgacaatctcctcgtgcgtcagctttcgatccgagtctcgaaccggcaccagcattgccgccggaacgccgtgtcttgtaatcgtgatcctttcgcaacccatcttgtccagctaaagctccgcatcagctatagtctccctctggccgtgcggcccgccccttgcggcgcaaccaaaccgaagctcaaaacgcgacatcgtcctcgtagcgcgaccggacactgaaggtaaaggttcgccacccgtctcccctgcaaaaccgggtcgcggagtactattgctttgcacagcgggggacgaccgaggcgctacggaagaggttggttcgcgaaactgagcaagagacccctcacccgtcccgctccggctggtggaagcgccggagcgggacacgctcagccccaagggagagggctatggattcagttctacgcgcggtgtccagtcaaagatgtgggacacgctcagccccaagggagagggctatggattcagttctacgcgcggtg

SEQ ID NO: 1038 - DNA, 106286 bp, Artificial Sequence
  Synthetic Oligonucleotide
  misc_feature (1)..(96242): n is a, c, g, or t
nnnnnnnnnnnnnnnnnnnnnnnnnnnnnnnnnnnnnnnnnnnnnnnnnnnnnnnnnnnnnnnnnnnnnnnnnnnnnnnnnnnnnnnnnnnnnnnnnnnnnnnnnnnnnnnnnnnnnnnnnnnnnnnnnnnnnnnnnnnnnnnnnnnnnnnnnnnnnnnnnnnnnnnnnnnnnnnnnnnnnnnnnnnnnnnnnnnnnnnnnnnnnnnnnnnnnnnnnnnnnnnnnnnnnnnnnnnnnnnnnnnnnnnnnnnnnnnnnnnnnnnnnnnnnnnnnnnnnnnnnnnnnnnnnnnnnnnnnnnnnnnnnnnnnnnnnnnnnnnnnnnnnnnnnnnnnnnnnnnnnnnnnnnnnnnnnnnnnnnnnnnnnnnnnnnnnnnnnnnnnnnnnnnnnnnnnnnnnnnnnnnnnnnnnnnnnnnnnnnnnnnnnnnnnnnnnnnnnnnnnnnnnnnnnnnnnnnnnnnnnnnnnnnnnnnnnnnnnnnnnnnnnnnnnnnnnnnnnnnnnnnnnnnnnnnnnnnnnnnnnnnnnnnnnnnnnnnnnnnnnnnnnnnnnnnnnnnnnnnnnnnnnnnnnnnnnnnnnnnnnnnnnnnnnnnnnnnnnnnnnnnnnnnnnnnnnnnnnnnnnnnnnnnnnnnnnnnnnnnnnnnnnnnnnnnnnnnnnnnnnnnnnnnnnnnnnnnnnnnnnnnnnnnnnnnnnnnnnnnnnnnnnnnnnnnnnnnnnnnnnnnnnnnnnnnnnnnnnnnnnnnnnnnnnnnnnnnnnnnnnnnnnnnnnnnnnnnnnnnnnnnnnnnnnnnnnnnnnnnnnnnnnnnnnnnnnnnnnnnnnnnnnnnnnnnnnnnnnnnnnnnnnnnnnnnnnnnnnnnnnnnnnnnnnnnnnnnnnnnnnnnnnnnnnnnnnnnnnnnnnnnnnnnnnnnnnnnnnnnnnnnnnnnnnnnnnnnnnnnnnnnnnnnnnnnnnnnnnnnnnnnnnnnnnnnnnnnnnnnnnnnnnnnnnnnnnnnnnnnnnnnnnnnnnnnnnnnnnnnnnnnnnnnnnnnnnnnnnnnnnnnnnnnnnnnnnnnnnnnnnnnnnnnnnnnnnnnnnnnnnnnnnnnnnnnnnnnnnnnnnnnnnnnnnnnnnnnnnnnnnnnnnnnnnnnnnnnnnnnnnnnnnnnnnnnnnnnnnnnnnnnnnnnnnnnnnnnnnnnnnnnnnnnnnnnnnnnnnnnnnnnnnnnnnnnnnnnnnnnnnnnnnnnnnnnnnnnnnnnnnnnnnnnnnnnnnnnnnnnnnnnnnnnnnnnnnnnnnnnnnnnnnnnnnnnnnnnnnnnnnnnnnnnnnnnnnnnnnnnnnnnnnnnnnnnnnnnnnnnnnnnnnnnnnnnnnnnnnnnnnnnnnnnnnnnnnnnnnnnnnnnnnnnnnnnnnnnnnnnnnnnnnnnnnnnnnnnnnnnnnnnnnnnnnnnnnnnnnnnnnnnnnnnnnnnnnnnnnnnnnnnnnnnnnnnnnnnnnnnnnnnnnnnnnnnnnnnnnnnnnnnnnnnnnnnnnnnnnnnnnnnnnnnnnnnnnnnnnnnnnnnnnnnnnnnnnnnnnnnnnnnnnnnnnnnnnnnnnnnnnnnnnnnnnnnnnnnnnnnnnnnnnnnnnnnnnnnnnnnnnnnnnnnnnnnnnnnnnnnnnnnnnnnnnnnnnnnnnnnnnnnnnnnnnnnnnnnnnnnnnnnnnnnnnnnnnnnnnnnnnnnnnnnnnnnnnnnnnnnnnnnnnnnnnnnnnnnnnnnnnnnnnnnnnnnnnnnnnnnnnnnnnnnnnnnnnnnnnnnnnnnnnnnnnnnnnnnnnnnnnnnnnnnnnnnnnnnnnnnnnnnnnnnnnnnnnnnnnnnnnnnnnnnnnnnnnnnnnnnnnnnnnnnnnnnnnnnnnnnnnnnnnnnnnnnnnnnnnnnnnnnnnnnnnnnnnnnnnnnnnnnnnnnnnnnnnnnnnnnnnnnnnnnnnnnnnnnnnnnnnnnnnnnnnnnnnnnnnnnnnnnnnnnnnnnnnnnnnnnnnnnnnnnnnnnnnnnnnnnnnnnnnnnnnnnnnnnnnnnnnnnnnnnnnnnnnnnnnnnnnnnnnnnnnnnnnnnnnnnnnnnnnnnnnnnnnnnnnnnnnnnnnnnnnnnnnnnnnnnnnnnnnnnnnnnnnnnnnnnnnnnnnnnnnnnnnnnnnnnnnnnnnnnnnnnnnnnnnnnnnnnnnnnnnnnnnnnnnnnnnnnnnnnnnnnnnnnnnnnnnnnnnnnnnnnnnnnnnnnnnnnnnnnnnnnnnnnnnnnnnnnnnnnnnnnnnnnnnnnnnnnnnnnnnnnnnnnnnnnnnnnnnnnnnnnnnnnnnnnnnnnnnnnnnnnnnnnnnnnnnnnnnnnnnnnnnnnnnnnnnnnnnnnnnnnnnnnnnnnnnnnnnnnnnnnnnnnnnnnnnnnnnnnnnnnnnnnnnnnnnnnnnnnnnnnnnnnnnnnnnnnnnnnnnnnnnnnnnnnnnnnnnnnnnnnnnnnnnnnnnnnnnnnnnnnnnnnnnnnnnnnnnnnnnnnnnnnnnnnnnnnnnnnnnnnnnnnnnnnnnnnnnnnnnnnnnnnnnnnnnnnnnnnnnnnnnnnnnnnnnnnnnnnnnnnnnnnnnnnnnnnnnnnnnnnnnnnnnnnnnnnnnnnnnnnnnnnnnnnnnnnnnnnnnnnnnnnnnnnnnnnnnnnnnnnnnnnnnnnnnnnnnnnnnnnnnnnnnnnnnnnnnnnnnnnnnnnnnnnnnnnnnnnnnnnnnnnnnnnnnnnnnnnnnnnnnnnnnnnnnnnnnnnnnnnnnnnnnnnnnnnnnnnnnnnnnnnnnnnnnnnnnnnnnnnnnnnnnnnnnnnnnnnnnnnnnnnnnnnnnnnnnnnnnnnnnnnnnnnnnnnnnnnnnnnnnnnnnnnnnnnnnnnnnnnnnnnnnnnnnnnnnnnnnnnnnnnnnnnnnnnnnnnnnnnnnnnnnnnnnnnnnnnnnnnnnnnnnnnnnnnnnnnnnnnnnnnnnnnnnnnnnnnnnnnnnnnnnnnnnnnnnnnnnnnnnnnnnnnnnnnnnnnnnnnnnnnnnnnnnnnnnnnnnnnnnnnnnnnnnnnnnnnnnnnnnnnnnnnnnnnnnnnnnnnnnnnnnnnnnnnnnnnnnnnnnnnnnnnnnnnnnnnnnnnnnnnnnnnnnnnnnnnnnnnnnnnnnnnnnnnnnnnnnnnnnnnnnnnnnnnnnnnnnnnnnnnnnnnnnnnnnnnnnnnnnnnnnnnnnnnnnnnnnnnnnnnnnnnnnnnnnnnnnnnnnnnnnnnnnnnnnnnnnnnnnnnnnnnnnnnnnnnnnnnnnnnnnnnnnnnnnnnnnnnnnnnnnnnnnnnnnnnnnnnnnnnnnnnnnnnnnnnnnnnnnnnnnnnnnnnnnnnnnnnnnnnnnnnnnnnnnnnnnnnnnnnnnnnnnnnnnnnnnnnnnnnnnnnnnnnnnnnnnnnnnnnnnnnnnnnnnnnnnnnnnnnnnnnnnnnnnnnnnnnnnnnnnnnnnnnnnnnnnnnnnnnnnnnnnnnnnnnnnnnnnnnnnnnnnnnnnnnnnnnnnnnnnnnnnnnnnnnnnnnnnnnnnnnnnnnnnnnnnnnnnnnnnnnnnnnnnnnnnnnnnnnnnnnnnnnnnnnnnnnnnnnnnnnnnnnnnnnnnnnnnnnnnnnnnnnnnnnnnnnnnnnnnnnnnnnnnnnnnnnnnnnnnnnnnnnnnnnnnnnnnnnnnnnnnnnnnnnnnnnnnnnnnnnnnnnnnnnnnnnnnnnnnnnnnnnnnnnnnnnnnnnnnnnnnnnnnnnnnnnnnnnnnnnnnnnnnnnnnnnnnnnnnnnnnnnnnnnnnnnnnnnnnnnnnnnnnnnnnnnnnnnnnnnnnnnnnnnnnnnnnnnnnnnnnnnnnnnnnnnnnnnnnnnnnnnnnnnnnnnnnnnnnnnnnnnnnnnnnnnnnnnnnnnnnnnnnnnnnnnnnnnnnnnnnnnnnnnnnnnnnnnnnnnnnnnnnnnnnnnnnnnnnnnnnnnnnnnnnnnnnnnnnnnnnnnnnnnnnnnnnnnnnnnnnnnnnnnnnnnnnnnnnnnnnnnnnnnnnnnnnnnnnnnnnnnnnnnnnnnnnnnnnnnnnnnnnnnnnnnnnnnnnnnnnnnnnnnnnnnnnnnnnnnnnnnnnnnnnnnnnnnnnnnnnnnnnnnnnnnnnnnnnnnnnnnnnnnnnnnnnnnnnnnnnnnnnnnnnnnnnnnnnnnnnnnnnnnnnnnnnnnnnnnnnnnnnnnnnnnnnnnnnnnnnnnnnnnnnnnnnnnnnnnnnnnnnnnnnnnnnnnnnnnnnnnnnnnnnnnnnnnnnnnnnnnnnnnnnnnnnnnnnnnnnnnnnnnnnnnnnnnnnnnnnnnnnnnnnnnnnnnnnnnnnnnnnnnnnnnnnnnnnnnnnnnnnnnnnnnnnnnnnnnnnnnnnnnnnnnnnnnnnnnnnnnnnnnnnnnnnnnnnnnnnnnnnnnnnnnnnnnnnnnnnnnnnnnnnnnnnnnnnnnnnnnnnnnnnnnnnnnnnnnnnnnnnnnnnnnnnnnnnnnnnnnnnnnnnnnnnnnnnnnnnnnnnnnnnnnnnnnnnnnnnnnnnnnnnnnnnnnnnnnnnnnnnnnnnnnnnnnnnnnnnnnnnnnnnnnnnnnnnnnnnnnnnnnnnnnnnnnnnnnnnnnnnnnnnnnnnnnnnnnnnnnnnnnnnnnnnnnnnnnnnnnnnnnnnnnnnnnnnnnnnnnnnnnnnnnnnnnnnnnnnnnnnnnnnnnnnnnnnnnnnnnnnnnnnnnnnnnnnnnnnnnnnnnnnnnnnnnnnnnnnnnnnnnnnnnnnnnnnnnnnnnnnnnnnnnnnnnnnnnnnnnnnnnnnnnnnnnnnnnnnnnnnnnnnnnnnnnnnnnnnnnnnnnnnnnnnnnnnnnnnnnnnnnnnnnnnnnnnnnnnnnnnnnnnnnnnnnnnnnnnnnnnnnnnnnnnnnnnnnnnnnnnnnnnnnnnnnnnnnnnnnnnnnnnnnnnnnnnnnnnnnnnnnnnnnnnnnnnnnnnnnnnnnnnnnnnnnnnnnnnnnnnnnnnnnnnnnnnnnnnnnnnnnnnnnnnnnnnnnnnnnnnnnnnnnnnnnnnnnnnnnnnnnnnnnnnnnnnnnnnnnnnnnnnnnnnnnnnnnnnnnnnnnnnnnnnnnnnnnnnnnnnnnnnnnnnnnnnnnnnnnnnnnnnnnnnnnnnnnnnnnnnnnnnnnnnnnnnnnnnnnnnnnnnnnnnnnnnnnnnnnnnnnnnnnnnnnnnnnnnnnnnnnnnnnnnnnnnnnnnnnnnnnnnnnnnnnnnnnnnnnnnnnnnnnnnnnnnnnnnnnnnnnnnnnnnnnnnnnnnnnnnnnnnnnnnnnnnnnnnnnnnnnnnnnnnnnnnnnnnnnnnnnnnnnnnnnnnnnnnnnnnnnnnnnnnnnnnnnnnnnnnnnnnnnnnnnnnnnnnnnnnnnnnnnnnnnnnnnnnnnnnnnnnnnnnnnnnnnnnnnnnnnnnnnnnnnnnnnnnnnnnnnnnnnnnnnnnnnnnnnnnnnnnnnnnnnnnnnnnnnnnnnnnnnnnnnnnnnnnnnnnnnnnnnnnnnnnnnnnnnnnnnnnnnnnnnnnnnnnnnnnnnnnnnnnnnnnnnnnnnnnnnnnnnnnnnnnnnnnnnnnnnnnnnnnnnnnnnnnnnnnnnnnnnnnnnnnnnnnnnnnnnnnnnnnnnnnnnnnnnnnnnnnnnnnnnnnnnnnnnnnnnnnnnnnnnnnnnnnnnnnnnnnnnnnnnnnnnnnnnnnnnnnnnnnnnnnnnnnnnnnnnnnnnnnnnnnnnnnnnnnnnnnnnnnnnnnnnnnnnnnnnnnnnnnnnnnnnnnnnnnnnnnnnnnnnnnnnnnnnnnnnnnnnnnnnnnnnnnnnnnnnnnnnnnnnnnnnnnnnnnnnnnnnnnnnnnnnnnnnnnnnnnnnnnnnnnnnnnnnnnnnnnnnnnnnnnnnnnnnnnnnnnnnnnnnnnnnnnnnnnnnnnnnnnnnnnnnnnnnnnnnnnnnnnnnnnnnnnnnnnnnnnnnnnnnnnnnnnnnnnnnnnnnnnnnnnnnnnnnnnnnnnnnnnnnnnnnnnnnnnnnnnnnnnnnnnnnnnnnnnnnnnnnnnnnnnnnnnnnnnnnnnnnnnnnnnnnnnnnnnnnnnnnnnnnnnnnnnnnnnnnnnnnnnnnnnnnnnnnnnnnnnnnnnnnnnnnnnnnnnnnnnnnnnnnnnnnnnnnnnnnnnnnnnnnnnnnnnnnnnnnnnnnnnnnnnnnnnnnnnnnnnnnnnnnnnnnnnnnnnnnnnnnnnnnnnnnnnnnnnnnnnnnnnnnnnnnnnnnnnnnnnnnnnnnnnnnnnnnnnnnnnnnnnnnnnnnnnnnnnnnnnnnnnnnnnnnnnnnnnnnnnnnnnnnnnnnnnnnnnnnnnnnnnnnnnnnnnnnnnnnnnnnnnnnnnnnnnnnnnnnnnnnnnnnnnnnnnnnnnnnnnnnnnnnnnnnnnnnnnnnnnnnnnnnnnnnnnnnnnnnnnnnnnnnnnnnnnnnnnnnnnnnnnnnnnnnnnnnnnnnnnnnnnnnnnnnnnnnnnnnnnnnnnnnnnnnnnnnnnnnnnnnnnnnnnnnnnnnnnnnnnnnnnnnnnnnnnnnnnnnnnnnnnnnnnnnnnnnnnnnnnnnnnnnnnnnnnnnnnnnnnnnnnnnnnnnnnnnnnnnnnnnnnnnnnnnnnnnnnnnnnnnnnnnnnnnnnnnnnnnnnnnnnnnnnnnnnnnnnnnnnnnnnnnnnnnnnnnnnnnnnnnnnnnnnnnnnnnnnnnnnnnnnnnnnnnnnnnnnnnnnnnnnnnnnnnnnnnnnnnnnnnnnnnnnnnnnnnnnnnnnnnnnnnnnnnnnnnnnnnnnnnnnnnnnnnnnnnnnnnnnnnnnnnnnnnnnnnnnnnnnnnnnnnnnnnnnnnnnnnnnnnnnnnnnnnnnnnnnnnnnnnnnnnnnnnnnnnnnnnnnnnnnnnnnnnnnnnnnnnnnnnnnnnnnnnnnnnnnnnnnnnnnnnnnnnnnnnnnnnnnnnnnnnnnnnnnnnnnnnnnnnnnnnnnnnnnnnnnnnnnnnnnnnnnnnnnnnnnnnnnnnnnnnnnnnnnnnnnnnnnnnnnnnnnnnnnnnnnnnnnnnnnnnnnnnnnnnnnnnnnnnnnnnnnnnnnnnnnnnnnnnnnnnnnnnnnnnnnnnnnnnnnnnnnnnnnnnnnnnnnnnnnnnnnnnnnnnnnnnnnnnnnnnnnnnnnnnnnnnnnnnnnnnnnnnnnnnnnnnnnnnnnnnnnnnnnnnnnnnnnnnnnnnnnnnnnnnnnnnnnnnnnnnnnnnnnnnnnnnnnnnnnnnnnnnnnnnnnnnnnnnnnnnnnnnnnnnnnnnnnnnnnnnnnnnnnnnnnnnnnnnnnnnnnnnnnnnnnnnnnnnnnnnnnnnnnnnnnnnnnnnnnnnnnnnnnnnnnnnnnnnnnnnnnnnnnnnnnnnnnnnnnnnnnnnnnnnnnnnnnnnnnnnnnnnnnnnnnnnnnnnnnnnnnnnnnnnnnnnnnnnnnnnnnnnnnnnnnnnnnnnnnnnnnnnnnnnnnnnnnnnnnnnnnnnnnnnnnnnnnnnnnnnnnnnnnnnnnnnnnnnnnnnnnnnnnnnnnnnnnnnnnnnnnnnnnnnnnnnnnnnnnnnnnnnnnnnnnnnnnnnnnnnnnnnnnnnnnnnnnnnnnnnnnnnnnnnnnnnnnnnnnnnnnnnnnnnnnnnnnnnnnnnnnnnnnnnnnnnnnnnnnnnnnnnnnnnnnnnnnnnnnnnnnnnnnnnnnnnnnnnnnnnnnnnnnnnnnnnnnnnnnnnnnnnnnnnnnnnnnnnnnnnnnnnnnnnnnnnnnnnnnnnnnnnnnnnnnnnnnnnnnnnnnnnnnnnnnnnnnnnnnnnnnnnnnnnnnnnnnnnnnnnnnnnnnnnnnnnnnnnnnnnnnnnnnnnnnnnnnnnnnnnnnnnnnnnnnnnnnnnnnnnnnnnnnnnnnnnnnnnnnnnnnnnnnnnnnnnnnnnnnnnnnnnnnnnnnnnnnnnnnnnnnnnnnnnnnnnnnnnnnnnnnnnnnnnnnnnnnnnnnnnnnnnnnnnnnnnnnnnnnnnnnnnnnnnnnnnnnnnnnnnnnnnnnnnnnnnnnnnnnnnnnnnnnnnnnnnnnnnnnnnnnnnnnnnnnnnnnnnnnnnnnnnnnnnnnnnnnnnnnnnnnnnnnnnnnnnnnnnnnnnnnnnnnnnnnnnnnnnnnnnnnnnnnnnnnnnnnnnnnnnnnnnnnnnnnnnnnnnnnnnnnnnnnnnnnnnnnnnnnnnnnnnnnnnnnnnnnnnnnnnnnnnnnnnnnnnnnnnnnnnnnnnnnnnnnnnnnnnnnnnnnnnnnnnnnnnnnnnnnnnnnnnnnnnnnnnnnnnnnnnnnnnnnnnnnnnnnnnnnnnnnnnnnnnnnnnnnnnnnnnnnnnnnnnnnnnnnnnnnnnnnnnnnnnnnnnnnnnnnnnnnnnnnnnnnnnnnnnnnnnnnnnnnnnnnnnnnnnnnnnnnnnnnnnnnnnnnnnnnnnnnnnnnnnnnnnnnnnnnnnnnnnnnnnnnnnnnnnnnnnnnnnnnnnnnnnnnnnnnnnnnnnnnnnnnnnnnnnnnnnnnnnnnnnnnnnnnnnnnnnnnnnnnnnnnnnnnnnnnnnnnnnnnnnnnnnnnnnnnnnnnnnnnnnnnnnnnnnnnnnnnnnnnnnnnnnnnnnnnnnnnnnnnnnnnnnnnnnnnnnnnnnnnnnnnnnnnnnnnnnnnnnnnnnnnnnnnnnnnnnnnnnnnnnnnnnnnnnnnnnnnnnnnnnnnnnnnnnnnnnnnnnnnnnnnnnnnnnnnnnnnnnnnnnnnnnnnnnnnnnnnnnnnnnnnnnnnnnnnnnnnnnnnnnnnnnnnnnnnnnnnnnnnnnnnnnnnnnnnnnnnnnnnnnnnnnnnnnnnnnnnnnnnnnnnnnnnnnnnnnnnnnnnnnnnnnnnnnnnnnnnnnnnnnnnnnnnnnnnnnnnnnnnnnnnnnnnnnnnnnnnnnnnnnnnnnnnnnnnnnnnnnnnnnnnnnnnnnnnnnnnnnnnnnnnnnnnnnnnnnnnnnnnnnnnnnnnnnnnnnnnnnnnnnnnnnnnnnnnnnnnnnnnnnnnnnnnnnnnnnnnnnnnnnnnnnnnnnnnnnnnnnnnnnnnnnnnnnnnnnnnnnnnnnnnnnnnnnnnnnnnnnnnnnnnnnnnnnnnnnnnnnnnnnnnnnnnnnnnnnnnnnnnnnnnnnnnnnnnnnnnnnnnnnnnnnnnnnnnnnnnnnnnnnnnnnnnnnnnnnnnnnnnnnnnnnnnnnnnnnnnnnnnnnnnnnnnnnnnnnnnnnnnnnnnnnnnnnnnnnnnnnnnnnnnnnnnnnnnnnnnnnnnnnnnnnnnnnnnnnnnnnnnnnnnnnnnnnnnnnnnnnnnnnnnnnnnnnnnnnnnnnnnnnnnnnnnnnnnnnnnnnnnnnnnnnnnnnnnnnnnnnnnnnnnnnnnnnnnnnnnnnnnnnnnnnnnnnnnnnnnnnnnnnnnnnnnnnnnnnnnnnnnnnnnnnnnnnnnnnnnnnnnnnnnnnnnnnnnnnnnnnnnnnnnnnnnnnnnnnnnnnnnnnnnnnnnnnnnnnnnnnnnnnnnnnnnnnnnnnnnnnnnnnnnnnnnnnnnnnnnnnnnnnnnnnnnnnnnnnnnnnnnnnnnnnnnnnnnnnnnnnnnnnnnnnnnnnnnnnnnnnnnnnnnnnnnnnnnnnnnnnnnnnnnnnnnnnnnnnnnnnnnnnnnnnnnnnnnnnnnnnnnnnnnnnnnnnnnnnnnnnnnnnnnnnnnnnnnnnnnnnnnnnnnnnnnnnnnnnnnnnnnnnnnnnnnnnnnnnnnnnnnnnnnnnnnnnnnnnnnnnnnnnnnnnnnnnnnnnnnnnnnnnnnnnnnnnnnnnnnnnnnnnnnnnnnnnnnnnnnnnnnnnnnnnnnnnnnnnnnnnnnnnnnnnnnnnnnnnnnnnnnnnnnnnnnnnnnnnnnnnnnnnnnnnnnnnnnnnnnnnnnnnnnnnnnnnnnnnnnnnnnnnnnnnnnnnnnnnnnnnnnnnnnnnnnnnnnnnnnnnnnnnnnnnnnnnnnnnnnnnnnnnnnnnnnnnnnnnnnnnnnnnnnnnnnnnnnnnnnnnnnnnnnnnnnnnnnnnnnnnnnnnnnnnnnnnnnnnnnnnnnnnnnnnnnnnnnnnnnnnnnnnnnnnnnnnnnnnnnnnnnnnnnnnnnnnnnnnnnnnnnnnnnnnnnnnnnnnnnnnnnnnnnnnnnnnnnnnnnnnnnnnnnnnnnnnnnnnnnnnnnnnnnnnnnnnnnnnnnnnnnnnnnnnnnnnnnnnnnnnnnnnnnnnnnnnnnnnnnnnnnnnnnnnnnnnnnnnnnnnnnnnnnnnnnnnnnnnnnnnnnnnnnnnnnnnnnnnnnnnnnnnnnnnnnnnnnnnnnnnnnnnnnnnnnnnnnnnnnnnnnnnnnnnnnnnnnnnnnnnnnnnnnnnnnnnnnnnnnnnnnnnnnnnnnnnnnnnnnnnnnnnnnnnnnnnnnnnnnnnnnnnnnnnnnnnnnnnnnnnnnnnnnnnnnnnnnnnnnnnnnnnnnnnnnnnnnnnnnnnnnnnnnnnnnnnnnnnnnnnnnnnnnnnnnnnnnnnnnnnnnnnnnnnnnnnnnnnnnnnnnnnnnnnnnnnnnnnnnnnnnnnnnnnnnnnnnnnnnnnnnnnnnnnnnnnnnnnnnnnnnnnnnnnnnnnnnnnnnnnnnnnnnnnnnnnnnnnnnnnnnnnnnnnnnnnnnnnnnnnnnnnnnnnnnnnnnnnnnnnnnnnnnnnnnnnnnnnnnnnnnnnnnnnnnnnnnnnnnnnnnnnnnnnnnnnnnnnnnnnnnnnnnnnnnnnnnnnnnnnnnnnnnnnnnnnnnnnnnnnnnnnnnnnnnnnnnnnnnnnnnnnnnnnnnnnnnnnnnnnnnnnnnnnnnnnnnnnnnnnnnnnnnnnnnnnnnnnnnnnnnnnnnnnnnnnnnnnnnnnnnnnnnnnnnnnnnnnnnnnnnnnnnnnnnnnnnnnnnnnnnnnnnnnnnnnnnnnnnnnnnnnnnnnnnnnnnnnnnnnnnnnnnnnnnnnnnnnnnnnnnnnnnnnnnnnnnnnnnnnnnnnnnnnnnnnnnnnnnnnnnnnnnnnnnnnnnnnnnnnnnnnnnnnnnnnnnnnnnnnnnnnnnnnnnnnnnnnnnnnnnnnnnnnnnnnnnnnnnnnnnnnnnnnnnnnnnnnnnnnnnnnnnnnnnnnnnnnnnnnnnnnnnnnnnnnnnnnnnnnnnnnnnnnnnnnnnnnnnnnnnnnnnnnnnnnnnnnnnnnnnnnnnnnnnnnnnnnnnnnnnnnnnnnnnnnnnnnnnnnnnnnnnnnnnnnnnnnnnnnnnnnnnnnnnnnnnnnnnnnnnnnnnnnnnnnnnnnnnnnnnnnnnnnnnnnnnnnnnnnnnnnnnnnnnnnnnnnnnnnnnnnnnnnnnnnnnnnnnnnnnnnnnnnnnnnnnnnnnnnnnnnnnnnnnnnnnnnnnnnnnnnnnnnnnnnnnnnnnnnnnnnnnnnnnnnnnnnnnnnnnnnnnnnnnnnnnnnnnnnnnnnnnnnnnnnnnnnnnnnnnnnnnnnnnnnnnnnnnnnnnnnnnnnnnnnnnnnnnnnnnnnnnnnnnnnnnnnnnnnnnnnnnnnnnnnnnnnnnnnnnnnnnnnnnnnnnnnnnnnnnnnnnnnnnnnnnnnnnnnnnnnnnnnnnnnnnnnnnnnnnnnnnnnnnnnnnnnnnnnnnnnnnnnnnnnnnnnnnnnnnnnnnnnnnnnnnnnnnnnnnnnnnnnnnnnnnnnnnnnnnnnnnnnnnnnnnnnnnnnnnnnnnnnnnnnnnnnnnnnnnnnnnnnnnnnnnnnnnnnnnnnnnnnnnnnnnnnnnnnnnnnnnnnnnnnnnnnnnnnnnnnnnnnnnnnnnnnnnnnnnnnnnnnnnnnnnnnnnnnnnnnnnnnnnnnnnnnnnnnnnnnnnnnnnnnnnnnnnnnnnnnnnnnnnnnnnnnnnnnnnnnnnnnnnnnnnnnnnnnnnnnnnnnnnnnnnnnnnnnnnnnnnnnnnnnnnnnnnnnnnnnnnnnnnnnnnnnnnnnnnnnnnnnnnnnnnnnnnnnnnnnnnnnnnnnnnnnnnnnnnnnnnnnnnnnnnnnnnnnnnnnnnnnnnnnnnnnnnnnnnnnnnnnnnnnnnnnnnnnnnnnnnnnnnnnnnnnnnnnnnnnnnnnnnnnnnnnnnnnnnnnnnnnnnnnnnnnnnnnnnnnnnnnnnnnnnnnnnnnnnnnnnnnnnnnnnnnnnnnnnnnnnnnnnnnnnnnnnnnnnnnnnnnnnnnnnnnnnnnnnnnnnnnnnnnnnnnnnnnnnnnnnnnnnnnnnnnnnnnnnnnnnnnnnnnnnnnnnnnnnnnnnnnnnnnnnnnnnnnnnnnnnnnnnnnnnnnnnnnnnnnnnnnnnnnnnnnnnnnnnnnnnnnnnnnnnnnnnnnnnnnnnnnnnnnnnnnnnnnnnnnnnnnnnnnnnnnnnnnnnnnnnnnnnnnnnnnnnnnnnnnnnnnnnnnnnnnnnnnnnnnnnnnnnnnnnnnnnnnnnnnnnnnnnnnnnnnnnnnnnnnnnnnnnnnnnnnnnnnnnnnnnnnnnnnnnnnnnnnnnnnnnnnnnnnnnnnnnnnnnnnnnnnnnnnnnnnnnnnnnnnnnnnnnnnnnnnnnnnnnnnnnnnnnnnnnnnnnnnnnnnnnnnnnnnnnnnnnnnnnnnnnnnnnnnnnnnnnnnnnnnnnnnnnnnnnnnnnnnnnnnnnnnnnnnnnnnnnnnnnnnnnnnnnnnnnnnnnnnnnnnnnnnnnnnnnnnnnnnnnnnnnnnnnnnnnnnnnnnnnnnnnnnnnnnnnnnnnnnnnnnnnnnnnnnnnnnnnnnnnnnnnnnnnnnnnnnnnnnnnnnnnnnnnnnnnnnnnnnnnnnnnnnnnnnnnnnnnnnnnnnnnnnnnnnnnnnnnnnnnnnnnnnnnnnnnnnnnnnnnnnnnnnnnnnnnnnnnnnnnnnnnnnnnnnnnnnnnnnnnnnnnnnnnnnnnnnnnnnnnnnnnnnnnnnnnnnnnnnnnnnnnnnnnnnnnnnnnnnnnnnnnnnnnnnnnnnnnnnnnnnnnnnnnnnnnnnnnnnnnnnnnnnnnnnnnnnnnnnnnnnnnnnnnnnnnnnnnnnnnnnnnnnnnnnnnnnnnnnnnnnnnnnnnnnnnnnnnnnnnnnnnnnnnnnnnnnnnnnnnnnnnnnnnnnnnnnnnnnnnnnnnnnnnnnnnnnnnnnnnnnnnnnnnnnnnnnnnnnnnnnnnnnnnnnnnnnnnnnnnnnnnnnnnnnnnnnnnnnnnnnnnnnnnnnnnnnnnnnnnnnnnnnnnnnnnnnnnnnnnnnnnnnnnnnnnnnnnnnnnnnnnnnnnnnnnnnnnnnnnnnnnnnnnnnnnnnnnnnnnnnnnnnnnnnnnnnnnnnnnnnnnnnnnnnnnnnnnnnnnnnnnnnnnnnnnnnnnnnnnnnnnnnnnnnnnnnnnnnnnnnnnnnnnnnnnnnnnnnnnnnnnnnnnnnnnnnnnnnnnnnnnnnnnnnnnnnnnnnnnnnnnnnnnnnnnnnnnnnnnnnnnnnnnnnnnnnnnnnnnnnnnnnnnnnnnnnnnnnnnnnnnnnnnnnnnnnnnnnnnnnnnnnnnnnnnnnnnnnnnnnnnnnnnnnnnnnnnnnnnnnnnnnnnnnnnnnnnnnnnnnnnnnnnnnnnnnnnnnnnnnnnnnnnnnnnnnnnnnnnnnnnnnnnnnnnnnnnnnnnnnnnnnnnnnnnnnnnnnnnnnnnnnnnnnnnnnnnnnnnnnnnnnnnnnnnnnnnnnnnnnnnnnnnnnnnnnnnnnnnnnnnnnnnnnnnnnnnnnnnnnnnnnnnnnnnnnnnnnnnnnnnnnnnnnnnnnnnnnnnnnnnnnnnnnnnnnnnnnnnnnnnnnnnnnnnnnnnnnnnnnnnnnnnnnnnnnnnnnnnnnnnnnnnnnnnnnnnnnnnnnnnnnnnnnnnnnnnnnnnnnnnnnnnnnnnnnnnnnnnnnnnnnnnnnnnnnnnnnnnnnnnnnnnnnnnnnnnnnnnnnnnnnnnnnnnnnnnnnnnnnnnnnnnnnnnnnnnnnnnnnnnnnnnnnnnnnnnnnnnnnnnnnnnnnnnnnnnnnnnnnnnnnnnnnnnnnnnnnnnnnnnnnnnnnnnnnnnnnnnnnnnnnnnnnnnnnnnnnnnnnnnnnnnnnnnnnnnnnnnnnnnnnnnnnnnnnnnnnnnnnnnnnnnnnnnnnnnnnnnnnnnnnnnnnnnnnnnnnnnnnnnnnnnnnnnnnnnnnnnnnnnnnnnnnnnnnnnnnnnnnnnnnnnnnnnnnnnnnnnnnnnnnnnnnnnnnnnnnnnnnnnnnnnnnnnnnnnnnnnnnnnnnnnnnnnnnnnnnnnnnnnnnnnnnnnnnnnnnnnnnnnnnnnnnnnnnnnnnnnnnnnnnnnnnnnnnnnnnnnnnnnnnnnnnnnnnnnnnnnnnnnnnnnnnnnnnnnnnnnnnnnnnnnnnnnnnnnnnnnnnnnnnnnnnnnnnnnnnnnnnnnnnnnnnnnnnnnnnnnnnnnnnnnnnnnnnnnnnnnnnnnnnnnnnnnnnnnnnnnnnnnnnnnnnnnnnnnnnnnnnnnnnnnnnnnnnnnnnnnnnnnnnnnnnnnnnnnnnnnnnnnnnnnnnnnnnnnnnnnnnnnnnnnnnnnnnnnnnnnnnnnnnnnnnnnnnnnnnnnnnnnnnnnnnnnnnnnnnnnnnnnnnnnnnnnnnnnnnnnnnnnnnnnnnnnnnnnnnnnnnnnnnnnnnnnnnnnnnnnnnnnnnnnnnnnnnnnnnnnnnnnnnnnnnnnnnnnnnnnnnnnnnnnnnnnnnnnnnnnnnnnnnnnnnnnnnnnnnnnnnnnnnnnnnnnnnnnnnnnnnnnnnnnnnnnnnnnnnnnnnnnnnnnnnnnnnnnnnnnnnnnnnnnnnnnnnnnnnnnnnnnnnnnnnnnnnnnnnnnnnnnnnnnnnnnnnnnnnnnnnnnnnnnnnnnnnnnnnnnnnnnnnnnnnnnnnnnnnnnnnnnnnnnnnnnnnnnnnnnnnnnnnnnnnnnnnnnnnnnnnnnnnnnnnnnnnnnnnnnnnnnnnnnnnnnnnnnnnnnnnnnnnnnnnnnnnnnnnnnnnnnnnnnnnnnnnnnnnnnnnnnnnnnnnnnnnnnnnnnnnnnnnnnnnnnnnnnnnnnnnnnnnnnnnnnnnnnnnnnnnnnnnnnnnnnnnnnnnnnnnnnnnnnnnnnnnnnnnnnnnnnnnnnnnnnnnnnnnnnnnnnnnnnnnnnnnnnnnnnnnnnnnnnnnnnnnnnnnnnnnnnnnnnnnnnnnnnnnnnnnnnnnnnnnnnnnnnnnnnnnnnnnnnnnnnnnnnnnnnnnnnnnnnnnnnnnnnnnnnnnnnnnnnnnnnnnnnnnnnnnnnnnnnnnnnnnnnnnnnnnnnnnnnnnnnnnnnnnnnnnnnnnnnnnnnnnnnnnnnnnnnnnnnnnnnnnnnnnnnnnnnnnnnnnnnnnnnnnnnnnnnnnnnnnnnnnnnnnnnnnnnnnnnnnnnnnnnnnnnnnnnnnnnnnnnnnnnnnnnnnnnnnnnnnnnnnnnnnnnnnnnnnnnnnnnnnnnnnnnnnnnnnnnnnnnnnnnnnnnnnnnnnnnnnnnnnnnnnnnnnnnnnnnnnnnnnnnnnnnnnnnnnnnnnnnnnnnnnnnnnnnnnnnnnnnnnnnnnnnnnnnnnnnnnnnnnnnnnnnnnnnnnnnnnnnnnnnnnnnnnnnnnnnnnnnnnnnnnnnnnnnnnnnnnnnnnnnnnnnnnnnnnnnnnnnnnnnnnnnnnnnnnnnnnnnnnnnnnnnnnnnnnnnnnnnnnnnnnnnnnnnnnnnnnnnnnnnnnnnnnnnnnnnnnnnnnnnnnnnnnnnnnnnnnnnnnnnnnnnnnnnnnnnnnnnnnnnnnnnnnnnnnnnnnnnnnnnnnnnnnnnnnnnnnnnnnnnnnnnnnnnnnnnnnnnnnnnnnnnnnnnnnnnnnnnnnnnnnnnnnnnnnnnnnnnnnnnnnnnnnnnnnnnnnnnnnnnnnnnnnnnnnnnnnnnnnnnnnnnnnnnnnnnnnnnnnnnnnnnnnnnnnnnnnnnnnnnnnnnnnnnnnnnnnnnnnnnnnnnnnnnnnnnnnnnnnnnnnnnnnnnnnnnnnnnnnnnnnnnnnnnnnnnnnnnnnnnnnnnnnnnnnnnnnnnnnnnnnnnnnnnnnnnnnnnnnnnnnnnnnnnnnnnnnnnnnnnnnnnnnnnnnnnnnnnnnnnnnnnnnnnnnnnnnnnnnnnnnnnnnnnnnnnnnnnnnnnnnnnnnnnnnnnnnnnnnnnnnnnnnnnnnnnnnnnnnnnnnnnnnnnnnnnnnnnnnnnnnnnnnnnnnnnnnnnnnnnnnnnnnnnnnnnnnnnnnnnnnnnnnnnnnnnnnnnnnnnnnnnnnnnnnnnnnnnnnnnnnnnnnnnnnnnnnnnnnnnnnnnnnnnnnnnnnnnnnnnnnnnnnnnnnnnnnnnnnnnnnnnnnnnnnnnnnnnnnnnnnnnnnnnnnnnnnnnnnnnnnnnnnnnnnnnnnnnnnnnnnnnnnnnnnnnnnnnnnnnnnnnnnnnnnnnnnnnnnnnnnnnnnnnnnnnnnnnnnnnnnnnnnnnnnnnnnnnnnnnnnnnnnnnnnnnnnnnnnnnnnnnnnnnnnnnnnnnnnnnnnnnnnnnnnnnnnnnnnnnnnnnnnnnnnnnnnnnnnnnnnnnnnnnnnnnnnnnnnnnnnnnnnnnnnnnnnnnnnnnnnnnnnnnnnnnnnnnnnnnnnnnnnnnnnnnnnnnnnnnnnnnnnnnnnnnnnnnnnnnnnnnnnnnnnnnnnnnnnnnnnnnnnnnnnnnnnnnnnnnnnnnnnnnnnnnnnnnnnnnnnnnnnnnnnnnnnnnnnnnnnnnnnnnnnnnnnnnnnnnnnnnnnnnnnnnnnnnnnnnnnnnnnnnnnnnnnnnnnnnnnnnnnnnnnnnnnnnnnnnnnnnnnnnnnnnnnnnnnnnnnnnnnnnnnnnnnnnnnnnnnnnnnnnnnnnnnnnnnnnnnnnnnnnnnnnnnnnnnnnnnnnnnnnnnnnnnnnnnnnnnnnnnnnnnnnnnnnnnnnnnnnnnnnnnnnnnnnnnnnnnnnnnnnnnnnnnnnnnnnnnnnnnnnnnnnnnnnnnnnnnnnnnnnnnnnnnnnnnnnnnnnnnnnnnnnnnnnnnnnnnnnnnnnnnnnnnnnnnnnnnnnnnnnnnnnnnnnnnnnnnnnnnnnnnnnnnnnnnnnnnnnnnnnnnnnnnnnnnnnnnnnnnnnnnnnnnnnnnnnnnnnnnnnnnnnnnnnnnnnnnnnnnnnnnnnnnnnnnnnnnnnnnnnnnnnnnnnnnnnnnnnnnnnnnnnnnnnnnnnnnnnnnnnnnnnnnnnnnnnnnnnnnnnnnnnnnnnnnnnnnnnnnnnnnnnnnnnnnnnnnnnnnnnnnnnnnnnnnnnnnnnnnnnnnnnnnnnnnnnnnnnnnnnnnnnnnnnnnnnnnnnnnnnnnnnnnnnnnnnnnnnnnnnnnnnnnnnnnnnnnnnnnnnnnnnnnnnnnnnnnnnnnnnnnnnnnnnnnnnnnnnnnnnnnnnnnnnnnnnnnnnnnnnnnnnnnnnnnnnnnnnnnnnnnnnnnnnnnnnnnnnnnnnnnnnnnnnnnnnnnnnnnnnnnnnnnnnnnnnnnnnnnnnnnnnnnnnnnnnnnnnnnnnnnnnnnnnnnnnnnnnnnnnnnnnnnnnnnnnnnnnnnnnnnnnnnnnnnnnnnnnnnnnnnnnnnnnnnnnnnnnnnnnnnnnnnnnnnnnnnnnnnnnnnnnnnnnnnnnnnnnnnnnnnnnnnnnnnnnnnnnnnnnnnnnnnnnnnnnnnnnnnnnnnnnnnnnnnnnnnnnnnnnnnnnnnnnnnnnnnnnnnnnnnnnnnnnnnnnnnnnnnnnnnnnnnnnnnnnnnnnnnnnnnnnnnnnnnnnnnnnnnnnnnnnnnnnnnnnnnnnnnnnnnnnnnnnnnnnnnnnnnnnnnnnnnnnnnnnnnnnnnnnnnnnnnnnnnnnnnnnnnnnnnnnnnnnnnnnnnnnnnnnnnnnnnnnnnnnnnnnnnnnnnnnnnnnnnnnnnnnnnnnnnnnnnnnnnnnnnnnnnnnnnnnnnnnnnnnnnnnnnnnnnnnnnnnnnnnnnnnnnnnnnnnnnnnnnnnnnnnnnnnnnnnnnnnnnnnnnnnnnnnnnnnnnnnnnnnnnnnnnnnnnnnnnnnnnnnnnnnnnnnnnnnnnnnnnnnnnnnnnnnnnnnnnnnnnnnnnnnnnnnnnnnnnnnnnnnnnnnnnnnnnnnnnnnnnnnnnnnnnnnnnnnnnnnnnnnnnnnnnnnnnnnnnnnnnnnnnnnnnnnnnnnnnnnnnnnnnnnnnnnnnnnnnnnnnnnnnnnnnnnnnnnnnnnnnnnnnnnnnnnnnnnnnnnnnnnnnnnnnnnnnnnnnnnnnnnnnnnnnnnnnnnnnnnnnnnnnnnnnnnnnnnnnnnnnnnnnnnnnnnnnnnnnnnnnnnnnnnnnnnnnnnnnnnnnnnnnnnnnnnnnnnnnnnnnnnnnnnnnnnnnnnnnnnnnnnnnnnnnnnnnnnnnnnnnnnnnnnnnnnnnnnnnnnnnnnnnnnnnnnnnnnnnnnnnnnnnnnnnnnnnnnnnnnnnnnnnnnnnnnnnnnnnnnnnnnnnnnnnnnnnnnnnnnnnnnnnnnnnnnnnnnnnnnnnnnnnnnnnnnnnnnnnnnnnnnnnnnnnnnnnnnnnnnnnnnnnnnnnnnnnnnnnnnnnnnnnnnnnnnnnnnnnnnnnnnnnnnnnnnnnnnnnnnnnnnnnnnnnnnnnnnnnnnnnnnnnnnnnnnnnnnnnnnnnnnnnnnnnnnnnnnnnnnnnnnnnnnnnnnnnnnnnnnnnnnnnnnnnnnnnnnnnnnnnnnnnnnnnnnnnnnnnnnnnnnnnnnnnnnnnnnnnnnnnnnnnnnnnnnnnnnnnnnnnnnnnnnnnnnnnnnnnnnnnnnnnnnnnnnnnnnnnnnnnnnnnnnnnnnnnnnnnnnnnnnnnnnnnnnnnnnnnnnnnnnnnnnnnnnnnnnnnnnnnnnnnnnnnnnnnnnnnnnnnnnnnnnnnnnnnnnnnnnnnnnnnnnnnnnnnnnnnnnnnnnnnnnnnnnnnnnnnnnnnnnnnnnnnnnnnnnnnnnnnnnnnnnnnnnnnnnnnnnnnnnnnnnnnnnnnnnnnnnnnnnnnnnnnnnnnnnnnnnnnnnnnnnnnnnnnnnnnnnnnnnnnnnnnnnnnnnnnnnnnnnnnnnnnnnnnnnnnnnnnnnnnnnnnnnnnnnnnnnnnnnnnnnnnnnnnnnnnnnnnnnnnnnnnnnnnnnnnnnnnnnnnnnnnnnnnnnnnnnnnnnnnnnnnnnnnnnnnnnnnnnnnnnnnnnnnnnnnnnnnnnnnnnnnnnnnnnnnnnnnnnnnnnnnnnnnnnnnnnnnnnnnnnnnnnnnnnnnnnnnnnnnnnnnnnnnnnnnnnnnnnnnnnnnnnnnnnnnnnnnnnnnnnnnnnnnnnnnnnnnnnnnnnnnnnnnnnnnnnnnnnnnnnnnnnnnnnnnnnnnnnnnnnnnnnnnnnnnnnnnnnnnnnnnnnnnnnnnnnnnnnnnnnnnnnnnnnnnnnnnnnnnnnnnnnnnnnnnnnnnnnnnnnnnnnnnnnnnnnnnnnnnnnnnnnnnnnnnnnnnnnnnnnnnnnnnnnnnnnnnnnnnnnnnnnnnnnnnnnnnnnnnnnnnnnnnnnnnnnnnnnnnnnnnnnnnnnnnnnnnnnnnnnnnnnnnnnnnnnnnnnnnnnnnnnnnnnnnnnnnnnnnnnnnnnnnnnnnnnnnnnnnnnnnnnnnnnnnnnnnnnnnnnnnnnnnnnnnnnnnnnnnnnnnnnnnnnnnnnnnnnnnnnnnnnnnnnnnnnnnnnnnnnnnnnnnnnnnnnnnnnnnnnnnnnnnnnnnnnnnnnnnnnnnnnnnnnnnnnnnnnnnnnnnnnnnnnnnnnnnnnnnnnnnnnnnnnnnnnnnnnnnnnnnnnnnnnnnnnnnnnnnnnnnnnnnnnnnnnnnnnnnnnnnnnnnnnnnnnnnnnnnnnnnnnnnnnnnnnnnnnnnnnnnnnnnnnnnnnnnnnnnnnnnnnnnnnnnnnnnnnnnnnnnnnnnnnnnnnnnnnnnnnnnnnnnnnnnnnnnnnnnnnnnnnnnnnnnnnnnnnnnnnnnnnnnnnnnnnnnnnnnnnnnnnnnnnnnnnnnnnnnnnnnnnnnnnnnnnnnnnnnnnnnnnnnnnnnnnnnnnnnnnnnnnnnnnnnnnnnnnnnnnnnnnnnnnnnnnnnnnnnnnnnnnnnnnnnnnnnnnnnnnnnnnnnnnnnnnnnnnnnnnnnnnnnnnnnnnnnnnnnnnnnnnnnnnnnnnnnnnnnnnnnnnnnnnnnnnnnnnnnnnnnnnnnnnnnnnnnnnnnnnnnnnnnnnnnnnnnnnnnnnnnnnnnnnnnnnnnnnnnnnnnnnnnnnnnnnnnnnnnnnnnnnnnnnnnnnnnnnnnnnnnnnnnnnnnnnnnnnnnnnnnnnnnnnnnnnnnnnnnnnnnnnnnnnnnnnnnnnnnnnnnnnnnnnnnnnnnnnnnnnnnnnnnnnnnnnnnnnnnnnnnnnnnnnnnnnnnnnnnnnnnnnnnnnnnnnnnnnnnnnnnnnnnnnnnnnnnnnnnnnnnnnnnnnnnnnnnnnnnnnnnnnnnnnnnnnnnnnnnnnnnnnnnnnnnnnnnnnnnnnnnnnnnnnnnnnnnnnnnnnnnnnnnnnnnnnnnnnnnnnnnnnnnnnnnnnnnnnnnnnnnnnnnnnnnnnnnnnnnnnnnnnnnnnnnnnnnnnnnnnnnnnnnnnnnnnnnnnnnnnnnnnnnnnnnnnnnnnnnnnnnnnnnnnnnnnnnnnnnnnnnnnnnnnnnnnnnnnnnnnnnnnnnnnnnnnnnnnnnnnnnnnnnnnnnnnnnnnnnnnnnnnnnnnnnnnnnnnnnnnnnnnnnnnnnnnnnnnnnnnnnnnnnnnnnnnnnnnnnnnnnnnnnnnnnnnnnnnnnnnnnnnnnnnnnnnnnnnnnnnnnnnnnnnnnnnnnnnnnnnnnnnnnnnnnnnnnnnnnnnnnnnnnnnnnnnnnnnnnnnnnnnnnnnnnnnnnnnnnnnnnnnnnnnnnnnnnnnnnnnnnnnnnnnnnnnnnnnnnnnnnnnnnnnnnnnnnnnnnnnnnnnnnnnnnnnnnnnnnnnnnnnnnnnnnnnnnnnnnnnnnnnnnnnnnnnnnnnnnnnnnnnnnnnnnnnnnnnnnnnnnnnnnnnnnnnnnnnnnnnnnnnnnnnnnnnnnnnnnnnnnnnnnnnnnnnnnnnnnnnnnnnnnnnnnnnnnnnnnnnnnnnnnnnnnnnnnnnnnnnnnnnnnnnnnnnnnnnnnnnnnnnnnnnnnnnnnnnnnnnnnnnnnnnnnnnnnnnnnnnnnnnnnnnnnnnnnnnnnnnnnnnnnnnnnnnnnnnnnnnnnnnnnnnnnnnnnnnnnnnnnnnnnnnnnnnnnnnnnnnnnnnnnnnnnnnnnnnnnnnnnnnnnnnnnnnnnnnnnnnnnnnnnnnnnnnnnnnnnnnnnnnnnnnnnnnnnnnnnnnnnnnnnnnnnnnnnnnnnnnnnnnnnnnnnnnnnnnnnnnnnnnnnnnnnnnnnnnnnnnnnnnnnnnnnnnnnnnnnnnnnnnnnnnnnnnnnnnnnnnnnnnnnnnnnnnnnnnnnnnnnnnnnnnnnnnnnnnnnnnnnnnnnnnnnnnnnnnnnnnnnnnnnnnnnnnnnnnnnnnnnnnnnnnnnnnnnnnnnnnnnnnnnnnnnnnnnnnnnnnnnnnnnnnnnnnnnnnnnnnnnnnnnnnnnnnnnnnnnnnnnnnnnnnnnnnnnnnnnnnnnnnnnnnnnnnnnnnnnnnnnnnnnnnnnnnnnnnnnnnnnnnnnnnnnnnnnnnnnnnnnnnnnnnnnnnnnnnnnnnnnnnnnnnnnnnnnnnnnnnnnnnnnnnnnnnnnnnnnnnnnnnnnnnnnnnnnnnnnnnnnnnnnnnnnnnnnnnnnnnnnnnnnnnnnnnnnnnnnnnnnnnnnnnnnnnnnnnnnnnnnnnnnnnnnnnnnnnnnnnnnnnnnnnnnnnnnnnnnnnnnnnnnnnnnnnnnnnnnnnnnnnnnnnnnnnnnnnnnnnnnnnnnnnnnnnnnnnnnnnnnnnnnnnnnnnnnnnnnnnnnnnnnnnnnnnnnnnnnnnnnnnnnnnnnnnnnnnnnnnnnnnnnnnnnnnnnnnnnnnnnnnnnnnnnnnnnnnnnnnnnnnnnnnnnnnnnnnnnnnnnnnnnnnnnnnnnnnnnnnnnnnnnnnnnnnnnnnnnnnnnnnnnnnnnnnnnnnnnnnnnnnnnnnnnnnnnnnnnnnnnnnnnnnnnnnnnnnnnnnnnnnnnnnnnnnnnnnnnnnnnnnnnnnnnnnnnnnnnnnnnnnnnnnnnnnnnnnnnnnnnnnnnnnnnnnnnnnnnnnnnnnnnnnnnnnnnnnnnnnnnnnnnnnnnnnnnnnnnnnnnnnnnnnnnnnnnnnnnnnnnnnnnnnnnnnnnnnnnnnnnnnnnnnnnnnnnnnnnnnnnnnnnnnnnnnnnnnnnnnnnnnnnnnnnnnnnnnnnnnnnnnnnnnnnnnnnnnnnnnnnnnnnnnnnnnnnnnnnnnnnnnnnnnnnnnnnnnnnnnnnnnnnnnnnnnnnnnnnnnnnnnnnnnnnnnnnnnnnnnnnnnnnnnnnnnnnnnnnnnnnnnnnnnnnnnnnnnnnnnnnnnnnnnnnnnnnnnnnnnnnnnnnnnnnnnnnnnnnnnnnnnnnnnnnnnnnnnnnnnnnnnnnnnnnnnnnnnnnnnnnnnnnnnnnnnnnnnnnnnnnnnnnnnnnnnnnnnnnnnnnnnnnnnnnnnnnnnnnnnnnnnnnnnnnnnnnnnnnnnnnnnnnnnnnnnnnnnnnnnnnnnnnnnnnnnnnnnnnnnnnnnnnnnnnnnnnnnnnnnnnnnnnnnnnnnnnnnnnnnnnnnnnnnnnnnnnnnnnnnnnnnnnnnnnnnnnnnnnnnnnnnnnnnnnnnnnnnnnnnnnnnnnnnnnnnnnnnnnnnnnnnnnnnnnnnnnnnnnnnnnnnnnnnnnnnnnnnnnnnnnnnnnnnnnnnnnnnnnnnnnnnnnnnnnnnnnnnnnnnnnnnnnnnnnnnnnnnnnnnnnnnnnnnnnnnnnnnnnnnnnnnnnnnnnnnnnnnnnnnnnnnnnnnnnnnnnnnnnnnnnnnnnnnnnnnnnnnnnnnnnnnnnnnnnnnnnnnnnnnnnnnnnnnnnnnnnnnnnnnnnnnnnnnnnnnnnnnnnnnnnnnnnnnnnnnnnnnnnnnnnnnnnnnnnnnnnnnnnnnnnnnnnnnnnnnnnnnnnnnnnnnnnnnnnnnnnnnnnnnnnnnnnnnnnnnnnnnnnnnnnnnnnnnnnnnnnnnnnnnnnnnnnnnnnnnnnnnnnnnnnnnnnnnnnnnnnnnnnnnnnnnnnnnnnnnnnnnnnnnnnnnnnnnnnnnnnnnnnnnnnnnnnnnnnnnnnnnnnnnnnnnnnnnnnnnnnnnnnnnnnnnnnnnnnnnnnnnnnnnnnnnnnnnnnnnnnnnnnnnnnnnnnnnnnnnnnnnnnnnnnnnnnnnnnnnnnnnnnnnnnnnnnnnnnnnnnnnnnnnnnnnnnnnnnnnnnnnnnnnnnnnnnnnnnnnnnnnnnnnnnnnnnnnnnnnnnnnnnnnnnnnnnnnnnnnnnnnnnnnnnnnnnnnnnnnnnnnnnnnnnnnnnnnnnnnnnnnnnnnnnnnnnnnnnnnnnnnnnnnnnnnnnnnnnnnnnnnnnnnnnnnnnnnnnnnnnnnnnnnnnnnnnnnnnnnnnnnnnnnnnnnnnnnnnnnnnnnnnnnnnnnnnnnnnnnnnnnnnnnnnnnnnnnnnnnnnnnnnnnnnnnnnnnnnnnnnnnnnnnnnnnnnnnnnnnnnnnnnnnnnnnnnnnnnnnnnnnnnnnnnnnnnnnnnnnnnnnnnnnnnnnnnnnnnnnnnnnnnnnnnnnnnnnnnnnnnnnnnnnnnnnnnnnnnnnnnnnnnnnnnnnnnnnnnnnnnnnnnnnnnnnnnnnnnnnnnnnnnnnnnnnnnnnnnnnnnnnnnnnnnnnnnnnnnnnnnnnnnnnnnnnnnnnnnnnnnnnnnnnnnnnnnnnnnnnnnnnnnnnnnnnnnnnnnnnnnnnnnnnnnnnnnnnnnnnnnnnnnnnnnnnnnnnnnnnnnnnnnnnnnnnnnnnnnnnnnnnnnnnnnnnnnnnnnnnnnnnnnnnnnnnnnnnnnnnnnnnnnnnnnnnnnnnnnnnnnnnnnnnnnnnnnnnnnnnnnnnnnnnnnnnnnnnnnnnnnnnnnnnnnnnnnnnnnnnnnnnnnnnnnnnnnnnnnnnnnnnnnnnnnnnnnnnnnnnnnnnnnnnnnnnnnnnnnnnnnnnnnnnnnnnnnnnnnnnnnnnnnnnnnnnnnnnnnnnnnnnnnnnnnnnnnnnnnnnnnnnnnnnnnnnnnnnnnnnnnnnnnnnnnnnnnnnnnnnnnnnnnnnnnnnnnnnnnnnnnnnnnnnnnnnnnnnnnnnnnnnnnnnnnnnnnnnnnnnnnnnnnnnnnnnnnnnnnnnnnnnnnnnnnnnnnnnnnnnnnnnnnnnnnnnnnnnnnnnnnnnnnnnnnnnnnnnnnnnnnnnnnnnnnnnnnnnnnnnnnnnnnnnnnnnnnnnnnnnnnnnnnnnnnnnnnnnnnnnnnnnnnnnnnnnnnnnnnnnnnnnnnnnnnnnnnnnnnnnnnnnnnnnnnnnnnnnnnnnnnnnnnnnnnnnnnnnnnnnnnnnnnnnnnnnnnnnnnnnnnnnnnnnnnnnnnnnnnnnnnnnnnnnnnnnnnnnnnnnnnnnnnnnnnnnnnnnnnnnnnnnnnnnnnnnnnnnnnnnnnnnnnnnnnnnnnnnnnnnnnnnnnnnnnnnnnnnnnnnnnnnnnnnnnnnnnnnnnnnnnnnnnnnnnnnnnnnnnnnnnnnnnnnnnnnnnnnnnnnnnnnnnnnnnnnnnnnnnnnnnnnnnnnnnnnnnnnnnnnnnnnnnnnnnnnnnnnnnnnnnnnnnnnnnnnnnnnnnnnnnnnnnnnnnnnnnnnnnnnnnnnnnnnnnnnnnnnnnnnnnnnnnnnnnnnnnnnnnnnnnnnnnnnnnnnnnnnnnnnnnnnnnnnnnnnnnnnnnnnnnnnnnnnnnnnnnnnnnnnnnnnnnnnnnnnnnnnnnnnnnnnnnnnnnnnnnnnnnnnnnnnnnnnnnnnnnnnnnnnnnnnnnnnnnnnnnnnnnnnnnnnnnnnnnnnnnnnnnnnnnnnnnnnnnnnnnnnnnnnnnnnnnnnnnnnnnnnnnnnnnnnnnnnnnnnnnnnnnnnnnnnnnnnnnnnnnnnnnnnnnnnnnnnnnnnnnnnnnnnnnnnnnnnnnnnnnnnnnnnnnnnnnnnnnnnnnnnnnnnnnnnnnnnnnnnnnnnnnnnnnnnnnnnnnnnnnnnnnnnnnnnnnnnnnnnnnnnnnnnnnnnnnnnnnnnnnnnnnnnnnnnnnnnnnnnnnnnnnnnnnnnnnnnnnnnnnnnnnnnnnnnnnnnnnnnnnnnnnnnnnnnnnnnnnnnnnnnnnnnnnnnnnnnnnnnnnnnnnnnnnnnnnnnnnnnnnnnnnnnnnnnnnnnnnnnnnnnnnnnnnnnnnnnnnnnnnnnnnnnnnnnnnnnnnnnnnnnnnnnnnnnnnnnnnnnnnnnnnnnnnnnnnnnnnnnnnnnnnnnnnnnnnnnnnnnnnnnnnnnnnnnnnnnnnnnnnnnnnnnnnnnnnnnnnnnnnnnnnnnnnnnnnnnnnnnnnnnnnnnnnnnnnnnnnnnnnnnnnnnnnnnnnnnnnnnnnnnnnnnnnnnnnnnnnnnnnnnnnnnnnnnnnnnnnnnnnnnnnnnnnnnnnnnnnnnnnnnnnnnnnnnnnnnnnnnnnnnnnnnnnnnnnnnnnnnnnnnnnnnnnnnnnnnnnnnnnnnnnnnnnnnnnnnnnnnnnnnnnnnnnnnnnnnnnnnnnnnnnnnnnnnnnnnnnnnnnnnnnnnnnnnnnnnnnnnnnnnnnnnnnnnnnnnnnnnnnnnnnnnnnnnnnnnnnnnnnnnnnnnnnnnnnnnnnnnnnnnnnnnnnnnnnnnnnnnnnnnnnnnnnnnnnnnnnnnnnnnnnnnnnnnnnnnnnnnnnnnnnnnnnnnnnnnnnnnnnnnnnnnnnnnnnnnnnnnnnnnnnnnnnnnnnnnnnnnnnnnnnnnnnnnnnnnnnnnnnnnnnnnnnnnnnnnnnnnnnnnnnnnnnnnnnnnnnnnnnnnnnnnnnnnnnnnnnnnnnnnnnnnnnnnnnnnnnnnnnnnnnnnnnnnnnnnnnnnnnnnnnnnnnnnnnnnnnnnnnnnnnnnnnnnnnnnnnnnnnnnnnnnnnnnnnnnnnnnnnnnnnnnnnnnnnnnnnnnnnnnnnnnnnnnnnnnnnnnnnnnnnnnnnnnnnnnnnnnnnnnnnnnnnnnnnnnnnnnnnnnnnnnnnnnnnnnnnnnnnnnnnnnnnnnnnnnnnnnnnnnnnnnnnnnnnnnnnnnnnnnnnnnnnnnnnnnnnnnnnnnnnnnnnnnnnnnnnnnnnnnnnnnnnnnnnnnnnnnnnnnnnnnnnnnnnnnnnnnnnnnnnnnnnnnnnnnnnnnnnnnnnnnnnnnnnnnnnnnnnnnnnnnnnnnnnnnnnnnnnnnnnnnnnnnnnnnnnnnnnnnnnnnnnnnnnnnnnnnnnnnnnnnnnnnnnnnnnnnnnnnnnnnnnnnnnnnnnnnnnnnnnnnnnnnnnnnnnnnnnnnnnnnnnnnnnnnnnnnnnnnnnnnnnnnnnnnnnnnnnnnnnnnnnnnnnnnnnnnnnnnnnnnnnnnnnnnnnnnnnnnnnnnnnnnnnnnnnnnnnnnnnnnnnnnnnnnnnnnnnnnnnnnnnnnnnnnnnnnnnnnnnnnnnnnnnnnnnnnnnnnnnnnnnnnnnnnnnnnnnnnnnnnnnnnnnnnnnnnnnnnnnnnnnnnnnnnnnnnnnnnnnnnnnnnnnnnnnnnnnnnnnnnnnnnnnnnnnnnnnnnnnnnnnnnnnnnnnnnnnnnnnnnnnnnnnnnnnnnnnnnnnnnnnnnnnnnnnnnnnnnnnnnnnnnnnnnnnnnnnnnnnnnnnnnnnnnnnnnnnnnnnnnnnnnnnnnnnnnnnnnnnnnnnnnnnnnnnnnnnnnnnnnnnnnnnnnnnnnnnnnnnnnnnnnnnnnnnnnnnnnnnnnnnnnnnnnnnnnnnnnnnnnnnnnnnnnnnnnnnnnnnnnnnnnnnnnnnnnnnnnnnnnnnnnnnnnnnnnnnnnnnnnnnnnnnnnnnnnnnnnnnnnnnnnnnnnnnnnnnnnnnnnnnnnnnnnnnnnnnnnnnnnnnnnnnnnnnnnnnnnnnnnnnnnnnnnnnnnnnnnnnnnnnnnnnnnnnnnnnnnnnnnnnnnnnnnnnnnnnnnnnnnnnnnnnnnnnnnnnnnnnnnnnnnnnnnnnnnnnnnnnnnnnnnnnnnnnnnnnnnnnnnnnnnnnnnnnnnnnnnnnnnnnnnnnnnnnnnnnnnnnnnnnnnnnnnnnnnnnnnnnnnnnnnnnnnnnnnnnnnnnnnnnnnnnnnnnnnnnnnnnnnnnnnnnnnnnnnnnnnnnnnnnnnnnnnnnnnnnnnnnnnnnnnnnnnnnnnnnnnnnnnnnnnnnnnnnnnnnnnnnnnnnnnnnnnnnnnnnnnnnnnnnnnnnnnnnnnnnnnnnnnnnnnnnnnnnnnnnnnnnnnnnnnnnnnnnnnnnnnnnnnnnnnnnnnnnnnnnnnnnnnnnnnnnnnnnnnnnnnnnnnnnnnnnnnnnnnnnnnnnnnnnnnnnnnnnnnnnnnnnnnnnnnnnnnnnnnnnnnnnnnnnnnnnnnnnnnnnnnnnnnnnnnnnnnnnnnnnnnnnnnnnnnnnnnnnnnnnnnnnnnnnnnnnnnnnnnnnnnnnnnnnnnnnnnnnnnnnnnnnnnnnnnnnnnnnnnnnnnnnnnnnnnnnnnnnnnnnnnnnnnnnnnnnnnnnnnnnnnnnnnnnnnnnnnnnnnnnnnnnnnnnnnnnnnnnnnnnnnnnnnnnnnnnnnnnnnnnnnnnnnnnnnnnnnnnnnnnnnnnnnnnnnnnnnnnnnnnnnnnnnnnnnnnnnnnnnnnnnnnnnnnnnnnnnnnnnnnnnnnnnnnnnnnnnnnnnnnnnnnnnnnnnnnnnnnnnnnnnnnnnnnnnnnnnnnnnnnnnnnnnnnnnnnnnnnnnnnnnnnnnnnnnnnnnnnnnnnnnnnnnnnnnnnnnnnnnnnnnnnnnnnnnnnnnnnnnnnnnnnnnnnnnnnnnnnnnnnnnnnnnnnnnnnnnnnnnnnnnnnnnnnnnnnnnnnnnnnnnnnnnnnnnnnnnnnnnnnnnnnnnnnnnnnnnnnnnnnnnnnnnnnnnnnnnnnnnnnnnnnnnnnnnnnnnnnnnnnnnnnnnnnnnnnnnnnnnnnnnnnnnnnnnnnnnnnnnnnnnnnnnnnnnnnnnnnnnnnnnnnnnnnnnnnnnnnnnnnnnnnnnnnnnnnnnnnnnnnnnnnnnnnnnnnnnnnnnnnnnnnnnnnnnnnnnnnnnnnnnnnnnnnnnnnnnnnnnnnnnnnnnnnnnnnnnnnnnnnnnnnnnnnnnnnnnnnnnnnnnnnnnnnnnnnnnnnnnnnnnnnnnnnnnnnnnnnnnnnnnnnnnnnnnnnnnnnnnnnnnnnnnnnnnnnnnnnnnnnnnnnnnnnnnnnnnnnnnnnnnnnnnnnnnnnnnnnnnnnnnnnnnnnnnnnnnnnnnnnnnnnnnnnnnnnnnnnnnnnnnnnnnnnnnnnnnnnnnnnnnnnnnnnnnnnnnnnnnnnnnnnnnnnnnnnnnnnnnnnnnnnnnnnnnnnnnnnnnnnnnnnnnnnnnnnnnnnnnnnnnnnnnnnnnnnnnnnnnnnnnnnnnnnnnnnnnnnnnnnnnnnnnnnnnnnnnnnnnnnnnnnnnnnnnnnnnnnnnnnnnnnnnnnnnnnnnnnnnnnnnnnnnnnnnnnnnnnnnnnnnnnnnnnnnnnnnnnnnnnnnnnnnnnnnnnnnnnnnnnnnnnnnnnnnnnnnnnnnnnnnnnnnnnnnnnnnnnnnnnnnnnnnnnnnnnnnnnnnnnnnnnnnnnnnnnnnnnnnnnnnnnnnnnnnnnnnnnnnnnnnnnnnnnnnnnnnnnnnnnnnnnnnnnnnnnnnnnnnnnnnnnnnnnnnnnnnnnnnnnnnnnnnnnnnnnnnnnnnnnnnnnnnnnnnnnnnnnnnnnnnnnnnnnnnnnnnnnnnnnnnnnnnnnnnnnnnnnnnnnnnnnnnnnnnnnnnnnnnnnnnnnnnnnnnnnnnnnnnnnnnnnnnnnnnnnnnnnnnnnnnnnnnnnnnnnnnnnnnnnnnnnnnnnnnnnnnnnnnnnnnnnnnnnnnnnnnnnnnnnnnnnnnnnnnnnnnnnnnnnnnnnnnnnnnnnnnnnnnnnnnnnnnnnnnnnnnnnnnnnnnnnnnnnnnnnnnnnnnnnnnnnnnnnnnnnnnnnnnnnnnnnnnnnnnnnnnnnnnnnnnnnnnnnnnnnnnnnnnnnnnnnnnnnnnnnnnnnnnnnnnnnnnnnnnnnnnnnnnnnnnnnnnnnnnnnnnnnnnnnnnnnnnnnnnnnnnnnnnnnnnnnnnnnnnnnnnnnnnnnnnnnnnnnnnnnnnnnnnnnnnnnnnnnnnnnnnnnnnnnnnnnnnnnnnnnnnnnnnnnnnnnnnnnnnnnnnnnnnnnnnnnnnnnnnnnnnnnnnnnnnnnnnnnnnnnnnnnnnnnnnnnnnnnnnnnnnnnnnnnnnnnnnnnnnnnnnnnnnnnnnnnnnnnnnnnnnnnnnnnnnnnnnnnnnnnnnnnnnnnnnnnnnnnnnnnnnnnnnnnnnnnnnnnnnnnnnnnnnnnnnnnnnnnnnnnnnnnnnnnnnnnnnnnnnnnnnnnnnnnnnnnnnnnnnnnnnnnnnnnnnnnnnnnnnnnnnnnnnnnnnnnnnnnnnnnnnnnnnnnnnnnnnnnnnnnnnnnnnnnnnnnnnnnnnnnnnnnnnnnnnnnnnnnnnnnnnnnnnnnnnnnnnnnnnnnnnnnnnnnnnnnnnnnnnnnnnnnnnnnnnnnnnnnnnnnnnnnnnnnnnnnnnnnnnnnnnnnnnnnnnnnnnnnnnnnnnnnnnnnnnnnnnnnnnnnnnnnnnnnnnnnnnnnnnnnnnnnnnnnnnnnnnnnnnnnnnnnnnnnnnnnnnnnnnnnnnnnnnnnnnnnnnnnnnnnnnnnnnnnnnnnnnnnnnnnnnnnnnnnnnnnnnnnnnnnnnnnnnnnnnnnnnnnnnnnnnnnnnnnnnnnnnnnnnnnnnnnnnnnnnnnnnnnnnnnnnnnnnnnnnnnnnnnnnnnnnnnnnnnnnnnnnnnnnnnnnnnnnnnnnnnnnnnnnnnnnnnnnnnnnnnnnnnnnnnnnnnnnnnnnnnnnnnnnnnnnnnnnnnnnnnnnnnnnnnnnnnnnnnnnnnnnnnnnnnnnnnnnnnnnnnnnnnnnnnnnnnnnnnnnnnnnnnnnnnnnnnnnnnnnnnnnnnnnnnnnnnnnnnnnnnnnnnnnnnnnnnnnnnnnnnnnnnnnnnnnnnnnnnnnnnnnnnnnnnnnnnnnnnnnnnnnnnnnnnnnnnnnnnnnnnnnnnnnnnnnnnnnnnnnnnnnnnnnnnnnnnnnnnnnnnnnnnnnnnnnnnnnnnnnnnnnnnnnnnnnnnnnnnnnnnnnnnnnnnnnnnnnnnnnnnnnnnnnnnnnnnnnnnnnnnnnnnnnnnnnnnnnnnnnnnnnnnnnnnnnnnnnnnnnnnnnnnnnnnnnnnnnnnnnnnnnnnnnnnnnnnnnnnnnnnnnnnnnnnnnnnnnnnnnnnnnnnnnnnnnnnnnnnnnnnnnnnnnnnnnnnnnnnnnnnnnnnnnnnnnnnnnnnnnnnnnnnnnnnnnnnnnnnnnnnnnnnnnnnnnnnnnnnnnnnnnnnnnnnnnnnnnnnnnnnnnnnnnnnnnnnnnnnnnnnnnnnnnnnnnnnnnnnnnnnnnnnnnnnnnnnnnnnnnnnnnnnnnnnnnnnnnnnnnnnnnnnnnnnnnnnnnnnnnnnnnnnnnnnnnnnnnnnnnnnnnnnnnnnnnnnnnnnnnnnnnnnnnnnnnnnnnnnnnnnnnnnnnnnnnnnnnnnnnnnnnnnnnnnnnnnnnnnnnnnnnnnnnnnnnnnnnnnnnnnnnnnnnnnnnnnnnnnnnnnnnnnnnnnnnnnnnnnnnnnnnnnnnnnnnnnnnnnnnnnnnnnnnnnnnnnnnnnnnnnnnnnnnnnnnnnnnnnnnnnnnnnnnnnnnnnnnnnnnnnnnnnnnnnnnnnnnnnnnnnnnnnnnnnnnnnnnnnnnnnnnnnnnnnnnnnnnnnnnnnnnnnnnnnnnnnnnnnnnnnnnnnnnnnnnnnnnnnnnnnnnnnnnnnnnnnnnnnnnnnnnnnnnnnnnnnnnnnnnnnnnnnnnnnnnnnnnnnnnnnnnnnnnnnnnnnnnnnnnnnnnnnnnnnnnnnnnnnnnnnnnnnnnnnnnnnnnnnnnnnnnnnnnnnnnnnnnnnnnnnnnnnnnnnnnnnnnnnnnnnnnnnnnnnnnnnnnnnnnnnnnnnnnnnnnnnnnnnnnnnnnnnnnnnnnnnnnnnnnnnnnnnnnnnnnnnnnnnnnnnnnnnnnnnnnnnnnnnnnnnnnnnnnnnnnnnnnnnnnnnnnnnnnnnnnnnnnnnnnnnnnnnnnnnnnnnnnnnnnnnnnnnnnnnnnnnnnnnnnnnnnnnnnnnnnnnnnnnnnnnnnnnnnnnnnnnnnnnnnnnnnnnnnnnnnnnnnnnnnnnnnnnnnnnnnnnnnnnnnnnnnnnnnnnnnnnnnnnnnnnnnnnnnnnnnnnnnnnnnnnnnnnnnnnnnnnnnnnnnnnnnnnnnnnnnnnnnnnnnnnnnnnnnnnnnnnnnnnnnnnnnnnnnnnnnnnnnnnnnnnnnnnnnnnnnnnnnnnnnnnnnnnnnnnnnnnnnnnnnnnnnnnnnnnnnnnnnnnnnnnnnnnnnnnnnnnnnnnnnnnnnnnnnnnnnnnnnnnnnnnnnnnnnnnnnnnnnnnnnnnnnnnnnnnnnnnnnnnnnnnnnnnnnnnnnnnnnnnnnnnnnnnnnnnnnnnnnnnnnnnnnnnnnnnnnnnnnnnnnnnnnnnnnnnnnnnnnnnnnnnnnnnnnnnnnnnnnnnnnnnnnnnnnnnnnnnnnnnnnnnnnnnnnnnnnnnnnnnnnnnnnnnnnnnnnnnnnnnnnnnnnnnnnnnnnnnnnnnnnnnnnnnnnnnnnnnnnnnnnnnnnnnnnnnnnnnnnnnnnnnnnnnnnnnnnnnnnnnnnnnnnnnnnnnnnnnnnnnnnnnnnnnnnnnnnnnnnnnnnnnnnnnnnnnnnnnnnnnnnnnnnnnnnnnnnnnnnnnnnnnnnnnnnnnnnnnnnnnnnnnnnnnnnnnnnnnnnnnnnnnnnnnnnnnnnnnnnnnnnnnnnnnnnnnnnnnnnnnnnnnnnnnnnnnnnnnnnnnnnnnnnnnnnnnnnnnnnnnnnnnnnnnnnnnnnnnnnnnnnnnnnnnnnnnnnnnnnnnnnnnnnnnnnnnnnnnnnnnnnnnnnnnnnnnnnnnnnnnnnnnnnnnnnnnnnnnnnnnnnnnnnnnnnnnnnnnnnnnnnnnnnnnnnnnnnnnnnnnnnnnnnnnnnnnnnnnnnnnnnnnnnnnnnnnnnnnnnnnnnnnnnnnnnnnnnnnnnnnnnnnnnnnnnnnnnnnnnnnnnnnnnnnnnnnnnnnnnnnnnnnnnnnnnnnnnnnnnnnnnnnnnnnnnnnnnnnnnnnnnnnnnnnnnnnnnnnnnnnnnnnnnnnnnnnnnnnnnnnnnnnnnnnnnnnnnnnnnnnnnnnnnnnnnnnnnnnnnnnnnnnnnnnnnnnnnnnnnnnnnnnnnnnnnnnnnnnnnnnnnnnnnnnnnnnnnnnnnnnnnnnnnnnnnnnnnnnnnnnnnnnnnnnnnnnnnnnnnnnnnnnnnnnnnnnnnnnnnnnnnnnnnnnnnnnnnnnnnnnnnnnnnnnnnnnnnnnnnnnnnnnnnnnnnnnnnnnnnnnnnnnnnnnnnnnnnnnnnnnnnnnnnnnnnnnnnnnnnnnnnnnnnnnnnnnnnnnnnnnnnnnnnnnnnnnnnnnnnnnnnnnnnnnnnnnnnnnnnnnnnnnnnnnnnnnnnnnnnnnnnnnnnnnnnnnnnnnnnnnnnnnnnnnnnnnnnnnnnnnnnnnnnnnnnnnnnnnnnnnnnnnnnnnnnnnnnnnnnnnnnnnnnnnnnnnnnnnnnnnnnnnnnnnnnnnnnnnnnnnnnnnnnnnnnnnnnnnnnnnnnnnnnnnnnnnnnnnnnnnnnnnnnnnnnnnnnnnnnnnnnnnnnnnnnnnnnnnnnnnnnnnnnnnnnnnnnnnnnnnnnnnnnnnnnnnnnnnnnnnnnnnnnnnnnnnnnnnnnnnnnnnnnnnnnnnnnnnnnnnnnnnnnnnnnnnnnnnnnnnnnnnnnnnnnnnnnnnnnnnnnnnnnnnnnnnnnnnnnnnnnnnnnnnnnnnnnnnnnnnnnnnnnnnnnnnnnnnnnnnnnnnnnnnnnnnnnnnnnnnnnnnnnnnnnnnnnnnnnnnnnnnnnnnnnnnnnnnnnnnnnnnnnnnnnnnnnnnnnnnnnnnnnnnnnnnnnnnnnnnnnnnnnnnnnnnnnnnnnnnnnnnnnnnnnnnnnnnnnnnnnnnnnnnnnnnnnnnnnnnnnnnnnnnnnnnnnnnnnnnnnnnnnnnnnnnnnnnnnnnnnnnnnnnnnnnnnnnnnnnnnnnnnnnnnnnnnnnnnnnnnnnnnnnnnnnnnnnnnnnnnnnnnnnnnnnnnnnnnnnnnnnnnnnnnnnnnnnnnnnnnnnnnnnnnnnnnnnnnnnnnnnnnnnnnnnnnnnnnnnnnnnnnnnnnnnnnnnnnnnnnnnnnnnnnnnnnnnnnnnnnnnnnnnnnnnnnnnnnnnnnnnnnnnnnnnnnnnnnnnnnnnnnnnnnnnnnnnnnnnnnnnnnnnnnnnnnnnnnnnnnnnnnnnnnnnnnnnnnnnnnnnnnnnnnnnnnnnnnnnnnnnnnnnnnnnnnnnnnnnnnnnnnnnnnnnnnnnnnnnnnnnnnnnnnnnnnnnnnnnnnnnnnnnnnnnnnnnnnnnnnnnnnnnnnnnnnnnnnnnnnnnnnnnnnnnnnnnnnnnnnnnnnnnnnnnnnnnnnnnnnnnnnnnnnnnnnnnnnnnnnnnnnnnnnnnnnnnnnnnnnnnnnnnnnnnnnnnnnnnnnnnnnnnnnnnnnnnnnnnnnnnnnnnnnnnnnnnnnnnnnnnnnnnnnnnnnnnnnnnnnnnnnnnnnnnnnnnnnnnnnnnnnnnnnnnnnnnnnnnnnnnnnnnnnnnnnnnnnnnnnnnnnnnnnnnnnnnnnnnnnnnnnnnnnnnnnnnnnnnnnnnnnnnnnnnnnnnnnnnnnnnnnnnnnnnnnnnnnnnnnnnnnnnnnnnnnnnnnnnnnnnnnnnnnnnnnnnnnnnnnnnnnnnnnnnnnnnnnnnnnnnnnnnnnnnnnnnnnnnnnnnnnnnnnnnnnnnnnnnnnnnnnnnnnnnnnnnnnnnnnnnnnnnnnnnnnnnnnnnnnnnnnnnnnnnnnnnnnnnnnnnnnnnnnnnnnnnnnnnnnnnnnnnnnnnnnnnnnnnnnnnnnnnnnnnnnnnnnnnnnnnnnnnnnnnnnnnnnnnnnnnnnnnnnnnnnnnnnnnnnnnnnnnnnnnnnnnnnnnnnnnnnnnnnnnnnnnnnnnnnnnnnnnnnnnnnnnnnnnnnnnnnnnnnnnnnnnnnnnnnnnnnnnnnnnnnnnnnnnnnnnnnnnnnnnnnnnnnnnnnnnnnnnnnnnnnnnnnnnnnnnnnnnnnnnnnnnnnnnnnnnnnnnnnnnnnnnnnnnnnnnnnnnnnnnnnnnnnnnnnnnnnnnnnnnnnnnnnnnnnnnnnnnnnnnnnnnnnnnnnnnnnnnnnnnnnnnnnnnnnnnnnnnnnnnnnnnnnnnnnnnnnnnnnnnnnnnnnnnnnnnnnnnnnnnnnnnnnnnnnnnnnnnnnnnnnnnnnnnnnnnnnnnnnnnnnnnnnnnnnnnnnnnnnnnnnnnnnnnnnnnnnnnnnnnnnnnnnnnnnnnnnnnnnnnnnnnnnnnnnnnnnnnnnnnnnnnnnnnnnnnnnnnnnnnnnnnnnnnnnnnnnnnnnnnnnnnnnnnnnnnnnnnnnnnnnnnnnnnnnnnnnnnnnnnnnnnnnnnnnnnnnnnnnnnnnnnnnnnnnnnnnnnnnnnnnnnnnnnnnnnnnnnnnnnnnnnnnnnnnnnnnnnnnnnnnnnnnnnnnnnnnnnnnnnnnnnnnnnnnnnnnnnnnnnnnnnnnnnnnnnnnnnnnnnnnnnnnnnnnnnnnnnnnnnnnnnnnnnnnnnnnnnnnnnnnnnnnnnnnnnnnnnnnnnnnnnnnnnnnnnnnnnnnnnnnnnnnnnnnnnnnnnnnnnnnnnnnnnnnnnnnnnnnnnnnnnnnnnnnnnnnnnnnnnnnnnnnnnnnnnnnnnnnnnnnnnnnnnnnnnnnnnnnnnnnnnnnnnnnnnnnnnnnnnnnnnnnnnnnnnnnnnnnnnnnnnnnnnnnnnnnnnnnnnnnnnnnnnnnnnnnnnnnnnnnnnnnnnnnnnnnnnnnnnnnnnnnnnnnnnnnnnnnnnnnnnnnnnnnnnnnnnnnnnnnnnnnnnnnnnnnnnnnnnnnnnnnnnnnnnnnnnnnnnnnnnnnnnnnnnnnnnnnnnnnnnnnnnnnnnnnnnnnnnnnnnnnnnnnnnnnnnnnnnnnnnnnnnnnnnnnnnnnnnnnnnnnnnnnnnnnnnnnnnnnnnnnnnnnnnnnnnnnnnnnnnnnnnnnnnnnnnnnnnnnnnnnnnnnnnnnnnnnnnnnnnnnnnnnnnnnnnnnnnnnnnnnnnnnnnnnnnnnnnnnnnnnnnnnnnnnnnnnnnnnnnnnnnnnnnnnnnnnnnnnnnnnnnnnnnnnnnnnnnnnnnnnnnnnnnnnnnnnnnnnnnnnnnnnnnnnnnnnnnnnnnnnnnnnnnnnnnnnnnnnnnnnnnnnnnnnnnnnnnnnnnnnnnnnnnnnnnnnnnnnnnnnnnnnnnnnnnnnnnnnnnnnnnnnnnnnnnnnnnnnnnnnnnnnnnnnnnnnnnnnnnnnnnnnnnnnnnnnnnnnnnnnnnnnnnnnnnnnnnnnnnnnnnnnnnnnnnnnnnnnnnnnnnnnnnnnnnnnnnnnnnnnnnnnnnnnnnnnnnnnnnnnnnnnnnnnnnnnnnnnnnnnnnnnnnnnnnnnnnnnnnnnnnnnnnnnnnnnnnnnnnnnnnnnnnnnnnnnnnnnnnnnnnnnnnnnnnnnnnnnnnnnnnnnnnnnnnnnnnnnnnnnnnnnnnnnnnnnnnnnnnnnnnnnnnnnnnnnnnnnnnnnnnnnnnnnnnnnnnnnnnnnnnnnnnnnnnnnnnnnnnnnnnnnnnnnnnnnnnnnnnnnnnnnnnnnnnnnnnnnnnnnnnnnnnnnnnnnnnnnnnnnnnnnnnnnnnnnnnnnnnnnnnnnnnnnnnnnnnnnnnnnnnnnnnnnnnnnnnnnnnnnnnnnnnnnnnnnnnnnnnnnnnnnnnnnnnnnnnnnnnnnnnnnnnnnnnnnnnnnnnnnnnnnnnnnnnnnnnnnnnnnnnnnnnnnnnnnnnnnnnnnnnnnnnnnnnnnnnnnnnnnnnnnnnnnnnnnnnnnnnnnnnnnnnnnnnnnnnnnnnnnnnnnnnnnnnnnnnnnnnnnnnnnnnnnnnnnnnnnnnnnnnnnnnnnnnnnnnnnnnnnnnnnnnnnnnnnnnnnnnnnnnnnnnnnnnnnnnnnnnnnnnnnnnnnnnnnnnnnnnnnnnnnnnnnnnnnnnnnnnnnnnnnnnnnnnnnnnnnnnnnnnnnnnnnnnnnnnnnnnnnnnnnnnnnnnnnnnnnnnnnnnnnnnnnnnnnnnnnnnnnnnnnnnnnnnnnnnnnnnnnnnnnnnnnnnnnnnnnnnnnnnnnnnnnnnnnnnnnnnnnnnnnnnnnnnnnnnnnnnnnnnnnnnnnnnnnnnnnnnnnnnnnnnnnnnnnnnnnnnnnnnnnnnnnnnnnnnnnnnnnnnnnnnnnnnnnnnnnnnnnnnnnnnnnnnnnnnnnnnnnnnnnnnnnnnnnnnnnnnnnnnnnnnnnnnnnnnnnnnnnnnnnnnnnnnnnnnnnnnnnnnnnnnnnnnnnnnnnnnnnnnnnnnnnnnnnnnnnnnnnnnnnnnnnnnnnnnnnnnnnnnnnnnnnnnnnnnnnnnnnnnnnnnnnnnnnnnnnnnnnnnnnnnnnnnnnnnnnnnnnnnnnnnnnnnnnnnnnnnnnnnnnnnnnnnnnnnnnnnnnnnnnnnnnnnnnnnnnnnnnnnnnnnnnnnnnnnnnnnnnnnnnnnnnnnnnnnnnnnnnnnnnnnnnnnnnnnnnnnnnnnnnnnnnnnnnnnnnnnnnnnnnnnnnnnnnnnnnnnnnnnnnnnnnnnnnnnnnnnnnnnnnnnnnnnnnnnnnnnnnnnnnnnnnnnnnnnnnnnnnnnnnnnnnnnnnnnnnnnnnnnnnnnnnnnnnnnnnnnnnnnnnnnnnnnnnnnnnnnnnnnnnnnnnnnnnnnnnnnnnnnnnnnnnnnnnnnnnnnnnnnnnnnnnnnnnnnnnnnnnnnnnnnnnnnnnnnnnnnnnnnnnnnnnnnnnnnnnnnnnnnnnnnnnnnnnnnnnnnnnnnnnnnnnnnnnnnnnnnnnnnnnnnnnnnnnnnnnnnnnnnnnnnnnnnnnnnnnnnnnnnnnnnnnnnnnnnnnnnnnnnnnnnnnnnnnnnnnnnnnnnnnnnnnnnnnnnnnnnnnnnnnnnnnnnnnnnnnnnnnnnnnnnnnnnnnnnnnnnnnnnnnnnnnnnnnnnnnnnnnnnnnnnnnnnnnnnnnnnnnnnnnnnnnnnnnnnnnnnnnnnnnnnnnnnnnnnnnnnnnnnnnnnnnnnnnnnnnnnnnnnnnnnnnnnnnnnnnnnnnnnnnnnnnnnnnnnnnnnnnnnnnnnnnnnnnnnnnnnnnnnnnnnnnnnnnnnnnnnnnnnnnnnnnnnnnnnnnnnnnnnnnnnnnnnnnnnnnnnnnnnnnnnnnnnnnnnnnnnnnnnnnnnnnnnnnnnnnnnnnnnnnnnnnnnnnnnnnnnnnnnnnnnnnnnnnnnnnnnnnnnnnnnnnnnnnnnnnnnnnnnnnnnnnnnnnnnnnnnnnnnnnnnnnnnnnnnnnnnnnnnnnnnnnnnnnnnnnnnnnnnnnnnnnnnnnnnnnnnnnnnnnnnnnnnnnnnnnnnnnnnnnnnnnnnnnnnnnnnnnnnnnnnnnnnnnnnnnnnnnnnnnnnnnnnnnnnnnnnnnnnnnnnnnnnnnnnnnnnnnnnnnnnnnnnnnnnnnnnnnnnnnnnnnnnnnnnnnnnnnnnnnnnnnnnnnnnnnnnnnnnnnnnnnnnnnnnnnnnnnnnnnnnnnnnnnnnnnnnnnnnnnnnnnnnnnnnnnnnnnnnnnnnnnnnnnnnnnnnnnnnnnnnnnnnnnnnnnnnnnnnnnnnnnnnnnnnnnnnnnnnnnnnnnnnnnnnnnnnnnnnnnnnnnnnnnnnnnnnnnnnnnnnnnnnnnnnnnnnnnnnnnnnnnnnnnnnnnnnnnnnnnnnnnnnnnnnnnnnnnnnnnnnnnnnnnnnnnnnnnnnnnnnnnnnnnnnnnnnnnnnnnnnnnnnnnnnnnnnnnnnnnnnnnnnnnnnnnnnnnnnnnnnnnnnnnnnnnnnnnnnnnnnnnnnnnnnnnnnnnnnnnnnnnnnnnnnnnnnnnnnnnnnnnnnnnnnnnnnnnnnnnnnnnnnnnnnnnnnnnnnnnnnnnnnnnnnnnnnnnnnnnnnnnnnnnnnnnnnnnnnnnnnnnnnnnnnnnnnnnnnnnnnnnnnnnnnnnnnnnnnnnnnnnnnnnnnnnnnnnnnnnnnnnnnnnnnnnnnnnnnnnnnnnnnnnnnnnnnnnnnnnnnnnnnnnnnnnnnnnnnnnnnnnnnnnnnnnnnnnnnnnnnnnnnnnnnnnnnnnnnnnnnnnnnnnnnnnnnnnnnnnnnnnnnnnnnnnnnnnnnnnnnnnnnnnnnnnnnnnnnnnnnnnnnnnnnnnnnnnnnnnnnnnnnnnnnnnnnnnnnnnnnnnnnnnnnnnnnnnnnnnnnnnnnnnnnnnnnnnnnnnnnnnnnnnnnnnnnnnnnnnnnnnnnnnnnnnnnnnnnnnnnnnnnnnnnnnnnnnnnnnnnnnnnnnnnnnnnnnnnnnnnnnnnnnnnnnnnnnnnnnnnnnnnnnnnnnnnnnnnnnnnnnnnnnnnnnnnnnnnnnnnnnnnnnnnnnnnnnnnnnnnnnnnnnnnnnnnnnnnnnnnnnnnnnnnnnnnnnnnnnnnnnnnnnnnnnnnnnnnnnnnnnnnnnnnnnnnnnnnnnnnnnnnnnnnnnnnnnnnnnnnnnnnnnnnnnnnnnnnnnnnnnnnnnnnnnnnnnnnnnnnnnnnnnnnnnnnnnnnnnnnnnnnnnnnnnnnnnnnnnnnnnnnnnnnnnnnnnnnnnnnnnnnnnnnnnnnnnnnnnnnnnnnnnnnnnnnnnnnnnnnnnnnnnnnnnnnnnnnnnnnnnnnnnnnnnnnnnnnnnnnnnnnnnnnnnnnnnnnnnnnnnnnnnnnnnnnnnnnnnnnnnnnnnnnnnnnnnnnnnnnnnnnnnnnnnnnnnnnnnnnnnnnnnnnnnnnnnnnnnnnnnnnnnnnnnnnnnnnnnnnnnnnnnnnnnnnnnnnnnnnnnnnnnnnnnnnnnnnnnnnnnnnnnnnnnnnnnnnnnnnnnnnnnnnnnnnnnnnnnnnnnnnnnnnnnnnnnnnnnnnnnnnnnnnnnnnnnnnnnnnnnnnnnnnnnnnnnnnnnnnnnnnnnnnnnnnnnnnnnnnnnnnnnnnnnnnnnnnnnnnnnnnnnnnnnnnnnnnnnnnnnnnnnnnnnnnnnnnnnnnnnnnnnnnnnnnnnnnnnnnnnnnnnnnnnnnnnnnnnnnnnnnnnnnnnnnnnnnnnnnnnnnnnnnnnnnnnnnnnnnnnnnnnnnnnnnnnnnnnnnnnnnnnnnnnnnnnnnnnnnnnnnnnnnnnnnnnnnnnnnnnnnnnnnnnnnnnnnnnnnnnnnnnnnnnnnnnnnnnnnnnnnnnnnnnnnnnnnnnnnnnnnnnnnnnnnnnnnnnnnnnnnnnnnnnnnnnnnnnnnnnnnnnnnnnnnnnnnnnnnnnnnnnnnnnnnnnnnnnnnnnnnnnnnnnnnnnnnnnnnnnnnnnnnnnnnnnnnnnnnnnnnnnnnnnnnnnnnnnnnnnnnnnnnnnnnnnnnnnnnnnnnnnnnnnnnnnnnnnnnnnnnnnnnnnnnnnnnnnnnnnnnnnnnnnnnnnnnnnnnnnnnnnnnnnnnnnnnnnnnnnnnnnnnnnnnnnnnnnnnnnnnnnnnnnnnnnnnnnnnnnnnnnnnnnnnnnnnnnnnnnnnnnnnnnnnnnnnnnnnnnnnnnnnnnnnnnnnnnnnnnnnnnnnnnnnnnnnnnnnnnnnnnnnnnnnnnnnnnnnnnnnnnnnnnnnnnnnnnnnnnnnnnnnnnnnnnnnnnnnnnnnnnnnnnnnnnnnnnnnnnnnnnnnnnnnnnnnnnnnnnnnnnnnnnnnnnnnnnnnnnnnnnnnnnnnnnnnnnnnnnnnnnnnnnnnnnnnnnnnnnnnnnnnnnnnnnnnnnnnnnnnnnnnnnnnnnnnnnnnnnnnnnnnnnnnnnnnnnnnnnnnnnnnnnnnnnnnnnnnnnnnnnnnnnnnnnnnnnnnnnnnnnnnnnnnnnnnnnnnnnnnnnnnnnnnnnnnnnnnnnnnnnnnnnnnnnnnnnnnnnnnnnnnnnnnnnnnnnnnnnnnnnnnnnnnnnnnnnnnnnnnnnnnnnnnnnnnnnnnnnnnnnnnnnnnnnnnnnnnnnnnnnnnnnnnnnnnnnnnnnnnnnnnnnnnnnnnnnnnnnnnnnnnnnnnnnnnnnnnnnnnnnnnnnnnnnnnnnnnnnnnnnnnnnnnnnnnnnnnnnnnnnnnnnnnnnnnnnnnnnnnnnnnnnnnnnnnnnnnnnnnnnnnnnnnnnnnnnnnnnnnnnnnnnnnnnnnnnnnnnnnnnnnnnnnnnnnnnnnnnnnnnnnnnnnnnnnnnnnnnnnnnnnnnnnnnnnnnnnnnnnnnnnnnnnnnnnnnnnnnnnnnnnnnnnnnnnnnnnnnnnnnnnnnnnnnnnnnnnnnnnnnnnnnnnnnnnnnnnnnnnnnnnnnnnnnnnnnnnnnnnnnnnnnnnnnnnnnnnnnnnnnnnnnnnnnnnnnnnnnnnnnnnnnnnnnnnnnnnnnnnnnnnnnnnnnnnnnnnnnnnnnnnnnnnnnnnnnnnnnnnnnnnnnnnnnnnnnnnnnnnnnnnnnnnnnnnnnnnnnnnnnnnnnnnnnnnnnnnnnnnnnnnnnnnnnnnnnnnnnnnnnnnnnnnnnnnnnnnnnnnnnnnnnnnnnnnnnnnnnnnnnnnnnnnnnnnnnnnnnnnnnnnnnnnnnnnnnnnnnnnnnnnnnnnnnnnnnnnnnnnnnnnnnnnnnnnnnnnnnnnnnnnnnnnnnnnnnnnnnnnnnnnnnnnnnnnnnnnnnnnnnnnnnnnnnnnnnnnnnnnnnnnnnnnnnnnnnnnnnnnnnnnnnnnnnnnnnnnnnnnnnnnnnnnnnnnnnnnnnnnnnnnnnnnnnnnnnnnnnnnnnnnnnnnnnnnnnnnnnnnnnnnnnnnnnnnnnnnnnnnnnnnnnnnnnnnnnnnnnnnnnnnnnnnnnnnnnnnnnnnnnnnnnnnnnnnnnnnnnnnnnnnnnnnnnnnnnnnnnnnnnnnnnnnnnnnnnnnnnnnnnnnnnnnnnnnnnnnnnnnnnnnnnnnnnnnnnnnnnnnnnnnnnnnnnnnnnnnnnnnnnnnnnnnnnnnnnnnnnnnnnnnnnnnnnnnnnnnnnnnnnnnnnnnnnnnnnnnnnnnnnnnnnnnnnnnnnnnnnnnnnnnnnnnnnnnnnnnnnnnnnnnnnnnnnnnnnnnnnnnnnnnnnnnnnnnnnnnnnnnnnnnnnnnnnnnnnnnnnnnnnnnnnnnnnnnnnnnnnnnnnnnnnnnnnnnnnnnnnnnnnnnnnnnnnnnnnnnnnnnnnnnnnnnnnnnnnnnnnnnnnnnnnnnnnnnnnnnnnnnnnnnnnnnnnnnnnnnnnnnnnnnnnnnnnnnnnnnnnnnnnnnnnnnnnnnnnnnnnnnnnnnnnnnnnnnnnnnnnnnnnnnnnnnnnnnnnnnnnnnnnnnnnnnnnnnnnnnnnnnnnnnnnnnnnnnnnnnnnnnnnnnnnnnnnnnnnnnnnnnnnnnnnnnnnnnnnnnnnnnnnnnnnnnnnnnnnnnnnnnnnnnnnnnnnnnnnnnnnnnnnnnnnnnnnnnnnnnnnnnnnnnnnnnnnnnnnnnnnnnnnnnnnnnnnnnnnnnnnnnnnnnnnnnnnnnnnnnnnnnnnnnnnnnnnnnnnnnnnnnnnnnnnnnnnnnnnnnnnnnnnnnnnnnnnnnnnnnnnnnnnnnnnnnnnnnnnnnnnnnnnnnnnnnnnnnnnnnnnnnnnnnnnnnnnnnnnnnnnnnnnnnnnnnnnnnnnnnnnnnnnnnnnnnnnnnnnnnnnnnnnnnnnnnnnnnnnnnnnnnnnnnnnnnnnnnnnnnnnnnnnnnnnnnnnnnnnnnnnnnnnnnnnnnnnnnnnnnnnnnnnnnnnnnnnnnnnnnnnnnnnnnnnnnnnnnnnnnnnnnnnnnnnnnnnnnnnnnnnnnnnnnnnnnnnnnnnnnnnnnnnnnnnnnnnnnnnnnnnnnnnnnnnnnnnnnnnnnnnnnnnnnnnnnnnnnnnnnnnnnnnnnnnnnnnnnnnnnnnnnnnnnnnnnnnnnnnnnnnnnnnnnnnnnnnnnnnnnnnnnnnnnnnnnnnnnnnnnnnnnnnnnnnnnnnnnnnnnnnnnnnnnnnnnnnnnnnnnnnnnnnnnnnnnnnnnnnnnnnnnnnnnnnnnnnnnnnnnnnnnnnnnnnnnnnnnnnnnnnnnnnnnnnnnnnnnnnnnnnnnnnnnnnnnnnnnnnnnnnnnnnnnnnnnnnnnnnnnnnnnnnnnnnnnnnnnnnnnnnnnnnnnnnnnnnnnnnnnnnnnnnnnnnnnnnnnnnnnnnnnnnnnnnnnnnnnnnnnnnnnnnnnnnnnnnnnnnnnnnnnnnnnnnnnnnnnnnnnnnnnnnnnnnnnnnnnnnnnnnnnnnnnnnnnnnnnnnnnnnnnnnnnnnnnnnnnnnnnnnnnnnnnnnnnnnnnnnnnnnnnnnnnnnnnnnnnnnnnnnnnnnnnnnnnnnnnnnnnnnnnnnnnnnnnnnnnnnnnnnnnnnnnnnnnnnnnnnnnnnnnnnnnnnnnnnnnnnnnnnnnnnnnnnnnnnnnnnnnnnnnnnnnnnnnnnnnnnnnnnnnnnnnnnnnnnnnnnnnnnnnnnnnnnnnnnnnnnnnnnnnnnnnnnnnnnnnnnnnnnnnnnnnnnnnnnnnnnnnnnnnnnnnnnnnnnnnnnnnnnnnnnnnnnnnnnnnnnnnnnnnnnnnnnnnnnnnnnnnnnnnnnnnnnnnnnnnnnnnnnnnnnnnnnnnnnnnnnnnnnnnnnnnnnnnnnnnnnnnnnnnnnnnnnnnnnnnnnnnnnnnnnnnnnnnnnnnnnnnnnnnnnnnnnnnnnnnnnnnnnnnnnnnnnnnnnnnnnnnnnnnnnnnnnnnnnnnnnnnnnnnnnnnnnnnnnnnnnnnnnnnnnnnnnnnnnnnnnnnnnnnnnnnnnnnnnnnnnnnnnnnnnnnnnnnnnnnnnnnnnnnnnnnnnnnnnnnnnnnnnnnnnnnnnnnnnnnnnnnnnnnnnnnnnnnnnnnnnnnnnnnnnnnnnnnnnnnnnnnnnnnnnnnnnnnnnnnnnnnnnnnnnnnnnnnnnnnnnnnnnnnnnnnnnnnnnnnnnnnnnnnnnnnnnnnnnnnnnnnnnnnnnnnnnnnnnnnnnnnnnnnnnnnnnnnnnnnnnnnnnnnnnnnnnnnnnnnnnnnnnnnnnnnnnnnnnnnnnnnnnnnnnnnnnnnnnnnnnnnnnnnnnnnnnnnnnnnnnnnnnnnnnnnnnnnnnnnnnnnnnnnnnnnnnnnnnnnnnnnnnnnnnnnnnnnnnnnnnnnnnnnnnnnnnnnnnnnnnnnnnnnnnnnnnnnnnnnnnnnnnnnnnnnnnnnnnnnnnnnnnnnnnnnnnnnnnnnnnnnnnnnnnnnnnnnnnnnnnnnnnnnnnnnnnnnnnnnnnnnnnnnnnnnnnnnnnnnnnnnnnnnnnnnnnnnnnnnnnnnnnnnnnnnnnnnnnnnnnnnnnnnnnnnnnnnnnnnnnnnnnnnnnnnnnnnnnnnnnnnnnnnnnnnnnnnnnnnnnnnnnnnnnnnnnnnnnnnnnnnnnnnnnnnnnnnnnnnnnnnnnnnnnnnnnnnnnnnnnnnnnnnnnnnnnnnnnnnnnnnnnnnnnnnnnnnnnnnnnnnnnnnnnnnnnnnnnnnnnnnnnnnnnnnnnnnnnnnnnnnnnnnnnnnnnnnnnnnnnnnnnnnnnnnnnnnnnnnnnnnnnnnnnnnnnnnnnnnnnnnnnnnnnnnnnnnnnnnnnnnnnnnnnnnnnnnnnnnnnnnnnnnnnnnnnnnnnnnnnnnnnnnnnnnnnnnnnnnnnnnnnnnnnnnnnnnnnnnnnnnnnnnnnnnnnnnnnnnnnnnnnnnnnnnnnnnnnnnnnnnnnnnnnnnnnnnnnnnnnnnnnnnnnnnnnnnnnnnnnnnnnnnnnnnnnnnnnnnnnnnnnnnnnnnnnnnnnnnnnnnnnnnnnnnnnnnnnnnnnnnnnnnnnnnnnnnnnnnnnnnnnnnnnnnnnnnnnnnnnnnnnnnnnnnnnnnnnnnnnnnnnnnnnnnnnnnnnnnnnnnnnnnnnnnnnnnnnnnnnnnnnnnnnnnnnnnnnnnnnnnnnnnnnnnnnnnnnnnnnnnnnnnnnnnnnnnnnnnnnnnnnnnnnnnnnnnnnnnnnnnnnnnnnnnnnnnnnnnnnnnnnnnnnnnnnnnnnnnnnnnnnnnnnnnnnnnnnnnnnnnnnnnnnnnnnnnnnnnnnnnnnnnnnnnnnnnnnnnnnnnnnnnnnnnnnnnnnnnnnnnnnnnnnnnnnnnnnnnnnnnnnnnnnnnnnnnnnnnnnnnnnnnnnnnnnnnnnnnnnnnnnnnnnnnnnnnnnnnnnnnnnnnnnnnnnnnnnnnnnnnnnnnnnnnnnnnnnnnnnnnnnnnnnnnnnnnnnnnnnnnnnnnnnnnnnnnnnnnnnnnnnnnnnnnnnnnnnnnnnnnnnnnnnnnnnnnnnnnnnnnnnnnnnnnnnnnnnnnnnnnnnnnnnnnnnnnnnnnnnnnnnnnnnnnnnnnnnnnnnnnnnnnnnnnnnnnnnnnnnnnnnnnnnnnnnnnnnnnnnnnnnnnnnnnnnnnnnnnnnnnnnnnnnnnnnnnnnnnnnnnnnnnnnnnnnnnnnnnnnnnnnnnnnnnnnnnnnnnnnnnnnnnnnnnnnnnnnnnnnnnnnnnnnnnnnnnnnnnnnnnnnnnnnnnnnnnnnnnnnnnnnnnnnnnnnnnnnnnnnnnnnnnnnnnnnnnnnnnnnnnnnnnnnnnnnnnnnnnnnnnnnnnnnnnnnnnnnnnnnnnnnnnnnnnnnnnnnnnnnnnnnnnnnnnnnnnnnnnnnnnnnnnnnnnnnnnnnnnnnnnnnnnnnnnnnnnnnnnnnnnnnnnnnnnnnnnnnnnnnnnnnnnnnnnnnnnnnnnnnnnnnnnnnnnnnnnnnnnnnnnnnnnnnnnnnnnnnnnnnnnnnnnnnnnnnnnnnnnnnnnnnnnnnnnnnnnnnnnnnnnnnnnnnnnnnnnnnnnnnnnnnnnnnnnnnnnnnnnnnnnnnnnnnnnnnnnnnnnnnnnnnnnnnnnnnnnnnnnnnnnnnnnnnnnnnnnnnnnnnnnnnnnnnnnnnnnnnnnnnnnnnnnnnnnnnnnnnnnnnnnnnnnnnnnnnnnnnnnnnnnnnnnnnnnnnnnnnnnnnnnnnnnnnnnnnnnnnnnnnnnnnnnnnnnnnnnnnnnnnnnnnnnnnnnnnnnnnnnnnnnnnnnnnnnnnnnnnnnnnnnnnnnnnnnnnnnnnnnnnnnnnnnnnnnnnnnnnnnnnnnnnnnnnnnnnnnnnnnnnnnnnnnnnnnnnnnnnnnnnnnnnnnnnnnnnnnnnnnnnnnnnnnnnnnnnnnnnnnnnnnnnnnnnnnnnnnnnnnnnnnnnnnnnnnnnnnnnnnnnnnnnnnnnnnnnnnnnnnnnnnnnnnnnnnnnnnnnnnnnnnnnnnnnnnnnnnnnnnnnnnnnnnnnnnnnnnnnnnnnnnnnnnnnnnnnnnnnnnnnnnnnnnnnnnnnnnnnnnnnnnnnnnnnnnnnnnnnnnnnnnnnnnnnnnnnnnnnnnnnnnnnnnnnnnnnnnnnnnnnnnnnnnnnnnnnnnnnnnnnnnnnnnnnnnnnnnnnnnnnnnnnnnnnnnnnnnnnnnnnnnnnnnnnnnnnnnnnnnnnnnnnnnnnnnnnnnnnnnnnnnnnnnnnnnnnnnnnnnnnnnnnnnnnnnnnnnnnnnnnnnnnnnnnnnnnnnnnnnnnnnnnnnnnnnnnnnnnnnnnnnnnnnnnnnnnnnnnnnnnnnnnnnnnnnnnnnnnnnnnnnnnnnnnnnnnnnnnnnnnnnnnnnnnnnnnnnnnnnnnnnnnnnnnnnnnnnnnnnnnnnnnnnnnnnnnnnnnnnnnnnnnnnnnnnnnnnnnnnnnnnnnnnnnnnnnnnnnnnnnnnnnnnnnnnnnnnnnnnnnnnnnnnnnnnnnnnnnnnnnnnnnnnnnnnnnnnnnnnnnnnnnnnnnnnnnnnnnnnnnnnnnnnnnnnnnnnnnnnnnnnnnnnnnnnnnnnnnnnnnnnnnnnnnnnnnnnnnnnnnnnnnnnnnnnnnnnnnnnnnnnnnnnnnnnnnnnnnnnnnnnnnnnnnnnnnnnnnnnnnnnnnnnnnnnnnnnnnnnnnnnnnnnnnnnnnnnnnnnnnnnnnnnnnnnnnnnnnnnnnnnnnnnnnnnnnnnnnnnnnnnnnnnnnnnnnnnnnnnnnnnnnnnnnnnnnnnnnnnnnnnnnnnnnnnnnnnnnnnnnnnnnnnnnnnnnnnnnnnnnnnnnnnnnnnnnnnnnnnnnnnnnnnnnnnnnnnnnnnnnnnnnnnnnnnnnnnnnnnnnnnnnnnnnnnnnnnnnnnnnnnnnnnnnnnnnnnnnnnnnnnnnnnnnnnnnnnnnnnnnnnnnnnnnnnnnnnnnnnnnnnnnnnnnnnnnnnnnnnnnnnnnnnnnnnnnnnnnnnnnnnnnnnnnnnnnnnnnnnnnnnnnnnnnnnnnnnnnnnnnnnnnnnnnnnnnnnnnnnnnnnnnnnnnnnnnnnnnnnnnnnnnnnnnnnnnnnnnnnnnnnnnnnnnnnnnnnnnnnnnnnnnnnnnnnnnnnnnnnnnnnnnnnnnnnnnnnnnnnnnnnnnnnnnnnnnnnnnnnnnnnnnnnnnnnnnnnnnnnnnnnnnnnnnnnnnnnnnnnnnnnnnnnnnnnnnnnnnnnnnnnnnnnnnnnnnnnnnnnnnnnnnnnnnnnnnnnnnnnnnnnnnnnnnnnnnnnnnnnnnnnnnnnnnnnnnnnnnnnnnnnnnnnnnnnnnnnnnnnnnnnnnnnnnnnnnnnnnnnnnnnnnnnnnnnnnnnnnnnnnnnnnnnnnnnnnnnnnnnnnnnnnnnnnnnnnnnnnnnnnnnnnnnnnnnnnnnnnnnnnnnnnnnnnnnnnnnnnnnnnnnnnnnnnnnnnnnnnnnnnnnnnnnnnnnnnnnnnnnnnnnnnnnnnnnnnnnnnnnnnnnnnnnnnnnnnnnnnnnnnnnnnnnnnnnnnnnnnnnnnnnnnnnnnnnnnnnnnnnnnnnnnnnnnnnnnnnnnnnnnnnnnnnnnnnnnnnnnnnnnnnnnnnnnnnnnnnnnnnnnnnnnnnnnnnnnnnnnnnnnnnnnnnnnnnnnnnnnnnnnnnnnnnnnnnnnnnnnnnnnnnnnnnnnnnnnnnnnnnnnnnnnnnnnnnnnnnnnnnnnnnnnnnnnnnnnnnnnnnnnnnnnnnnnnnnnnnnnnnnnnnnnnnnnnnnnnnnnnnnnnnnnnnnnnnnnnnnnnnnnnnnnnnnnnnnnnnnnnnnnnnnnnnnnnnnnnnnnnnnnnnnnnnnnnnnnnnnnnnnnnnnnnnnnnnnnnnnnnnnnnnnnnnnnnnnnnnnnnnnnnnnnnnnnnnnnnnnnnnnnnnnnnnnnnnnnnnnnnnnnnnnnnnnnnnnnnnnnnnnnnnnnnnnnnnnnnnnnnnnnnnnnnnnnnnnnnnnnnnnnnnnnnnnnnnnnnnnnnnnnnnnnnnnnnnnnnnnnnnnnnnnnnnnnnnnnnnnnnnnnnnnnnnnnnnnnnnnnnnnnnnnnnnnnnnnnnnnnnnnnnnnnnnnnnnnnnnnnnnnnnnnnnnnnnnnnnnnnnnnnnnnnnnnnnnnnnnnnnnnnnnnnnnnnnnnnnnnnnnnnnnnnnnnnnnnnnnnnnnnnnnnnnnnnnnnnnnnnnnnnnnnnnnnnnnnnnnnnnnnnnnnnnnnnnnnnnnnnnnnnnnnnnnnnnnnnnnnnnnnnnnnnnnnnnnnnnnnnnnnnnnnnnnnnnnnnnnnnnnnnnnnnnnnnnnnnnnnnnnnnnnnnnnnnnnnnnnnnnnnnnnnnnnnnnnnnnnnnnnnnnnnnnnnnnnnnnnnnnnnnnnnnnnnnnnnnnnnnnnnnnnnnnnnnnnnnnnnnnnnnnnnnnnnnnnnnnnnnnnnnnnnnnnnnnnnnnnnnnnnnnnnnnnnnnnnnnnnnnnnnnnnnnnnnnnnnnnnnnnnnnnnnnnnnnnnnnnnnnnnnnnnnnnnnnnnnnnnnnnnnnnnnnnnnnnnnnnnnnnnnnnnnnnnnnnnnnnnnnnnnnnnnnnnnnnnnnnnnnnnnnnnnnnnnnnnnnnnnnnnnnnnnnnnnnnnnnnnnnnnnnnnnnnnnnnnnnnnnnnnnnnnnnnnnnnnnnnnnnnnnnnnnnnnnnnnnnnnnnnnnnnnnnnnnnnnnnnnnnnnnnnnnnnnnnnnnnnnnnnnnnnnnnnnnnnnnnnnnnnnnnnnnnnnnnnnnnnnnnnnnnnnnnnnnnnnnnnnnnnnnnnnnnnnnnnnnnnnnnnnnnnnnnnnnnnnnnnnnnnnnnnnnnnnnnnnnnnnnnnnnnnnnnnnnnnnnnnnnnnnnnnnnnnnnnnnnnnnnnnnnnnnnnnnnnnnnnnnnnnnnnnnnnnnnnnnnnnnnnnnnnnnnnnnnnnnnnnnnnnnnnnnnnnnnnnnnnnnnnnnnnnnnnnnnnnnnnnnnnnnnnnnnnnnnnnnnnnnnnnnnnnnnnnnnnnnnnnnnnnnnnnnnnnnnnnnnnnnnnnnnnnnnnnnnnnnnnnnnnnnnnnnnnnnnnnnnnnnnnnnnnnnnnnnnnnnnnnnnnnnnnnnnnnnnnnnnnnnnnnnnnnnnnnnnnnnnnnnnnnnnnnnnnnnnnnnnnnnnnnnnnnnnnnnnnnnnnnnnnnnnnnnnnnnnnnnnnnnnnnnnnnnnnnnnnnnnnnnnnnnnnnnnnnnnnnnnnnnnnnnnnnnnnnnnnnnnnnnnnnnnnnnnnnnnnnnnnnnnnnnnnnnnnnnnnnnnnnnnnnnnnnnnnnnnnnnnnnnnnnnnnnnnnnnnnnnnnnnnnnnnnnnnnnnnnnnnnnnnnnnnnnnnnnnnnnnnnnnnnnnnnnnnnnnnnnnnnnnnnnnnnnnnnnnnnnnnnnnnnnnnnnnnnnnnnnnnnnnnnnnnnnnnnnnnnnnnnnnnnnnnnnnnnnnnnnnnnnnnnnnnnnnnnnnnnnnnnnnnnnnnnnnnnnnnnnnnnnnnnnnnnnnnnnnnnnnnnnnnnnnnnnnnnnnnnnnnnnnnnnnnnnnnnnnnnnnnnnnnnnnnnnnnnnnnnnnnnnnnnnnnnnnnnnnnnnnnnnnnnnnnnnnnnnnnnnnnnnnnnnnnnnnnnnnnnnnnnnnnnnnnnnnnnnnnnnnnnnnnnnnnnnnnnnnnnnnnnnnnnnnnnnnnnnnnnnnnnnnnnnnnnnnnnnnnnnnnnnnnnnnnnnnnnnnnnnnnnnnnnnnnnnnnnnnnnnnnnnnnnnnnnnnnnnnnnnnnnnnnnnnnnnnnnnnnnnnnnnnnnnnnnnnnnnnnnnnnnnnnnnnnnnnnnnnnnnnnnnnnnnnnnnnnnnnnnnnnnnnnnnnnnnnnnnnnnnnnnnnnnnnnnnnnnnnnnnnnnnnnnnnnnnnnnnnnnnnnnnnnnnnnnnnnnnnnnnnnnnnnnnnnnnnnnnnnnnnnnnnnnnnnnnnnnnnnnnnnnnnnnnnnnnnnnnnnnnnnnnnnnnnnnnnnnnnnnnnnnnnnnnnnnnnnnnnnnnnnnnnnnnnnnnnnnnnnnnnnnnnnnnnnnnnnnnnnnnnnnnnnnnnnnnnnnnnnnnnnnnnnnnnnnnnnnnnnnnnnnnnnnnnnnnnnnnnnnnnnnnnnnnnnnnnnnnnnnnnnnnnnnnnnnnnnnnnnnnnnnnnnnnnnnnnnnnnnnnnnnnnnnnnnnnnnnnnnnnnnnnnnnnnnnnnnnnnnnnnnnnnnnnnnnnnnnnnnnnnnnnnnnnnnnnnnnnnnnnnnnnnnnnnnnnnnnnnnnnnnnnnnnnnnnnnnnnnnnnnnnnnnnnnnnnnnnnnnnnnnnnnnnnnnnnnnnnnnnnnnnnnnnnnnnnnnnnnnnnnnnnnnnnnnnnnnnnnnnnnnnnnnnnnnnnnnnnnnnnnnnnnnnnnnnnnnnnnnnnnnnnnnnnnnnnnnnnnnnnnnnnnnnnnnnnnnnnnnnnnnnnnnnnnnnnnnnnnnnnnnnnnnnnnnnnnnnnnnnnnnnnnnnnnnnnnnnnnnnnnnnnnnnnnnnnnnnnnnnnnnnnnnnnnnnnnnnnnnnnnnnnnnnnnnnnnnnnnnnnnnnnnnnnnnnnnnnnnnnnnnnnnnnnnnnnnnnnnnnnnnnnnnnnnnnnnnnnnnnnnnnnnnnnnnnnnnnnnnnnnnnnnnnnnnnnnnnnnnnnnnnnnnnnnnnnnnnnnnnnnnnnnnnnnnnnnnnnnnnnnnnnnnnnnnnnnnnnnnnnnnnnnnnnnnnnnnnnnnnnnnnnnnnnnnnnnnnnnnnnnnnnnnnnnnnnnnnnnnnnnnnnnnnnnnnnnnnnnnnnnnnnnnnnnnnnnnnnnnnnnnnnnnnnnnnnnnnnnnnnnnnnnnnnnnnnnnnnnnnnnnnnnnnnnnnnnnnnnnnnnnnnnnnnnnnnnnnnnnnnnnnnnnnnnnnnnnnnnnnnnnnnnnnnnnnnnnnnnnnnnnnnnnnnnnnnnnnnnnnnnnnnnnnnnnnnnnnnnnnnnnnnnnnnnnnnnnnnnnnnnnnnnnnnnnnnnnnnnnnnnnnnnnnnnnnnnnnnnnnnnnnnnnnnnnnnnnnnnnnnnnnnnnnnnnnnnnnnnnnnnnnnnnnnnnnnnnnnnnnnnnnnnnnnnnnnnnnnnnnnnnnnnnnnnnnnnnnnnnnnnnnnnnnnnnnnnnnnnnnnnnnnnnnnnnnnnnnnnnnnnnnnnnnnnnnnnnnnnnnnnnnnnnnnnnnnnnnnnnnnnnnnnnnnnnnnnnnnnnnnnnnnnnnnnnnnnnnnnnnnnnnnnnnnnnnnnnnnnnnnnnnnnnnnnnnnnnnnnnnnnnnnnnnnnnnnnnnnnnnnnnnnnnnnnnnnnnnnnnnnnnnnnnnnnnnnnnnnnnnnnnnnnnnnnnnnnnnnnnnnnnnnnnnnnnnnnnnnnnnnnnnnnnnnnnnnnnnnnnnnnnnnnnnnnnnnnnnnnnnnnnnnnnnnnnnnnnnnnnnnnnnnnnnnnnnnnnnnnnnnnnnnnnnnnnnnnnnnnnnnnnnnnnnnnnnnnnnnnnnnnnnnnnnnnnnnnnnnnnnnnnnnnnnnnnnnnnnnnnnnnnnnnnnnnnnnnnnnnnnnnnnnnnnnnnnnnnnnnnnnnnnnnnnnnnnnnnnnnnnnnnnnnnnnnnnnnnnnnnnnnnnnnnnnnnnnnnnnnnnnnnnnnnnnnnnnnnnnnnnnnnnnnnnnnnnnnnnnnnnnnnnnnnnnnnnnnnnnnnnnnnnnnnnnnnnnnnnnnnnnnnnnnnnnnnnnnnnnnnnnnnnnnnnnnnnnnnnnnnnnnnnnnnnnnnnnnnnnnnnnnnnnnnnnnnnnnnnnnnnnnnnnnnnnnnnnnnnnnnnnnnnnnnnnnnnnnnnnnnnnnnnnnnnnnnnnnnnnnnnnnnnnnnnnnnnnnnnnnnnnnnnnnnnnnnnnnnnnnnnnnnnnnnnnnnnnnnnnnnnnnnnnnnnnnnnnnnnnnnnnnnnnnnnnnnnnnnnnnnnnnnnnnnnnnnnnnnnnnnnnnnnnnnnnnnnnnnnnnnnnnnnnnnnnnnnnnnnnnnnnnnnnnnnnnnnnnnnnnnnnnnnnnnnnnnnnnnnnnnnnnnnnnnnnnnnnnnnnnnnnnnnnnnnnnnnnnnnnnnnnnnnnnnnnnnnnnnnnnnnnnnnnnnnnnnnnnnnnnnnnnnnnnnnnnnnnnnnnnnnnnnnnnnnnnnnnnnnnnnnnnnnnnnnnnnnnnnnnnnnnnnnnnnnnnnnnnnnnnnnnnnnnnnnnnnnnnnnnnnnnnnnnnnnnnnnnnnnnnnnnnnnnnnnnnnnnnnnnnnnnnnnnnnnnnnnnnnnnnnnnnnnnnnnnnnnnnnnnnnnnnnnnnnnnnnnnnnnnnnnnnnnnnnnnnnnnnnnnnnnnnnnnnnnnnnnnnnnnnnnnnnnnnnnnnnnnnnnnnnnnnnnnnnnnnnnnnnnnnnnnnnnnnnnnnnnnnnnnnnnnnnnnnnnnnnnnnnnnnnnnnnnnnnnnnnnnnnnnnnnnnnnnnnnnnnnnnnnnnnnnnnnnnnnnnnnnnnnnnnnnnnnnnnnnnnnnnnnnnnnnnnnnnnnnnnnnnnnnnnnnnnnnnnnnnnnnnnnnnnnnnnnnnnnnnnnnnnnnnnnnnnnnnnnnnnnnnnnnnnnnnnnnnnnnnnnnnnnnnnnnnnnnnnnnnnnnnnnnnnnnnnnnnnnnnnnnnnnnnnnnnnnnnnnnnnnnnnnnnnnnnnnnnnnnnnnnnnnnnnnnnnnnnnnnnnnnnnnnnnnnnnnnnnnnnnnnnnnnnnnnnnnnnnnnnnnnnnnnnnnnnnnnnnnnnnnnnnnnnnnnnnnnnnnnnnnnnnnnnnnnnnnnnnnnnnnnnnnnnnnnnnnnnnnnnnnnnnnnnnnnnnnnnnnnnnnnnnnnnnnnnnnnnnnnnnnnnnnnnnnnnnnnnnnnnnnnnnnnnnnnnnnnnnnnnnnnnnnnnnnnnnnnnnnnnnnnnnnnnnnnnnnnnnnnnnnnnnnnnnnnnnnnnnnnnnnnnnnnnnnnnnnnnnnnnnnnnnnnnnnnnnnnnnnnnnnnnnnnnnnnnnnnnnnnnnnnnnnnnnnnnnnnnnnnnnnnnnnnnnnnnnnnnnnnnnnnnnnnnnnnnnnnnnnnnnnnnnnnnnnnnnnnnnnnnnnnnnnnnnnnnnnnnnnnnnnnnnnnnnnnnnnnnnnnnnnnnnnnnnnnnnnnnnnnnnnnnnnnnnnnnnnnnnnnnnnnnnnnnnnnnnnnnnnnnnnnnnnnnnnnnnnnnnnnnnnnnnnnnnnnnnnnnnnnnnnnnnnnnnnnnnnnnnnnnnnnnnnnnnnnnnnnnnnnnnnnnnnnnnnnnnnnnnnnnnnnnnnnnnnnnnnnnnnnnnnnnnnnnnnnnnnnnnnnnnnnnnnnnnnnnnnnnnnnnnnnnnnnnnnnnnnnnnnnnnnnnnnnnnnnnnnnnnnnnnnnnnnnnnnnnnnnnnnnnnnnnnnnnnnnnnnnnnnnnnnnnnnnnnnnnnnnnnnnnnnnnnnnnnnnnnnnnnnnnnnnnnnnnnnnnnnnnnnnnnnnnnnnnnnnnnnnnnnnnnnnnnnnnnnnnnnnnnnnnnnnnnnnnnnnnnnnnnnnnnnnnnnnnnnnnnnnnnnnnnnnnnnnnnnnnnnnnnnnnnnnnnnnnnnnnnnnnnnnnnnnnnnnnnnnnnnnnnnnnnnnnnnnnnnnnnnnnnnnnnnnnnnnnnnnnnnnnnnnnnnnnnnnnnnnnnnnnnnnnnnnnnnnnnnnnnnnnnnnnnnnnnnnnnnnnnnnnnnnnnnnnnnnnnnnnnnnnnnnnnnnnnnnnnnnnnnnnnnnnnnnnnnnnnnnnnnnnnnnnnnnnnnnnnnnnnnnnnnnnnnnnnnnnnnnnnnnnnnnnnnnnnnnnnnnnnnnnnnnnnnnnnnnnnnnnnnnnnnnnnnnnnnnnnnnnnnnnnnnnnnnnnnnnnnnnnnnnnnnnnnnnnnnnnnnnnnnnnnnnnnnnnnnnnnnnnnnnnnnnnnnnnnnnnnnnnnnnnnnnnnnnnnnnnnnnnnnnnnnnnnnnnnnnnnnnnnnnnnnnnnnnnnnnnnnnnnnnnnnnnnnnnnnnnnnnnnnnnnnnnnnnnnnnnnnnnnnnnnnnnnnnnnnnnnnnnnnnnnnnnnnnnnnnnnnnnnnnnnnnnnnnnnnnnnnnnnnnnnnnnnnnnnnnnnnnnnnnnnnnnnnnnnnnnnnnnnnnnnnnnnnnnnnnnnnnnnnnnnnnnnnnnnnnnnnnnnnnnnnnnnnnnnnnnnnnnnnnnnnnnnnnnnnnnnnnnnnnnnnnnnnnnnnnnnnnnnnnnnnnnnnnnnnnnnnnnnnnnnnnnnnnnnnnnnnnnnnnnnnnnnnnnnnnnnnnnnnnnnnnnnnnnnnnnnnnnnnnnnnnnnnnnnnnnnnnnnnnnnnnnnnnnnnnnnnnnnnnnnnnnnnnnnnnnnnnnnnnnnnnnnnnnnnnnnnnnnnnnnnnnnnnnnnnnnnnnnnnnnnnnnnnnnnnnnnnnnnnnnnnnnnnnnnnnnnnnnnnnnnnnnnnnnnnnnnnnnnnnnnnnnnnnnnnnnnnnnnnnnnnnnnnnnnnnnnnnnnnnnnnnnnnnnnnnnnnnnnnnnnnnnnnnnnnnnnnnnnnnnnnnnnnnnnnnnnnnnnnnnnnnnnnnnnnnnnnnnnnnnnnnnnnnnnnnnnnnnnnnnnnnnnnnnnnnnnnnnnnnnnnnnnnnnnnnnnnnnnnnnnnnnnnnnnnnnnnnnnnnnnnnnnnnnnnnnnnnnnnnnnnnnnnnnnnnnnnnnnnnnnnnnnnnnnnnnnnnnnnnnnnnnnnnnnnnnnnnnnnnnnnnnnnnnnnnnnnnnnnnnnnnnnnnnnnnnnnnnnnnnnnnnnnnnnnnnnnnnnnnnnnnnnnnnnnnnnnnnnnnnnnnnnnnnnnnnnnnnnnnnnnnnnnnnnnnnnnnnnnnnnnnnnnnnnnnnnnnnnnnnnnnnnnnnnnnnnnnnnnnnnnnnnnnnnnnnnnnnnnnnnnnnnnnnnnnnnnnnnnnnnnnnnnnnnnnnnnnnnnnnnnnnnnnnnnnnnnnnnnnnnnnnnnnnnnnnnnnnnnnnnnnnnnnnnnnnnnnnnnnnnnnnnnnnnnnnnnnnnnnnnnnnnnnnnnnnnnnnnnnnnnnnnnnnnnnnnnnnnnnnnnnnnnnnnnnnnnnnnnnnnnnnnnnnnnnnnnnnnnnnnnnnnnnnnnnnnnnnnnnnnnnnnnnnnnnnnnnnnnnnnnnnnnnnnnnnnnnnnnnnnnnnnnnnnnnnnnnnnnnnnnnnnnnnnnnnnnnnnnnnnnnnnnnnnnnnnnnnnnnnnnnnnnnnnnnnnnnnnnnnnnnnnnnnnnnnnnnnnnnnnnnnnnnnnnnnnnnnnnnnnnnnnnnnnnnnnnnnnnnnnnnnnnnnnnnnnnnnnnnnnnnnnnnnnnnnnnnnnnnnnnnnnnnnnnnnnnnnnnnnnnnnnnnnnnnnnnnnnnnnnnnnnnnnnnnnnnnnnnnnnnnnnnnnnnnnnnnnnnnnnnnnnnnnnnnnnnnnnnnnnnnnnnnnnnnnnnnnnnnnnnnnnnnnnnnnnnnnnnnnnnnnnnnnnnnnnnnnnnnnnnnnnnnnnnnnnnnnnnnnnnnnnnnnnnnnnnnnnnnnnnnnnnnnnnnnnnnnnnnnnnnnnnnnnnnnnnnnnnnnnnnnnnnnnnnnnnnnnnnnnnnnnnnnnnnnnnnnnnnnnnnnnnnnnnnnnnnnnnnnnnnnnnnnnnnnnnnnnnnnnnnnnnnnnnnnnnnnnnnnnnnnnnnnnnnnnnnnnnnnnnnnnnnnnnnnnnnnnnnnnnnnnnnnnnnnnnnnnnnnnnnnnnnnnnnnnnnnnnnnnnnnnnnnnnnnnnnnnnnnnnnnnnnnnnnnnnnnnnnnnnnnnnnnnnnnnnnnnnnnnnnnnnnnnnnnnnnnnnnnnnnnnnnnnnnnnnnnnnnnnnnnnnnnnnnnnnnnnnnnnnnnnnnnnnnnnnnnnnnnnnnnnnnnnnnnnnnnnnnnnnnnnnnnnnnnnnnnnnnnnnnnnnnnnnnnnnnnnnnnnnnnnnnnnnnnnnnnnnnnnnnnnnnnnnnnnnnnnnnnnnnnnnnnnnnnnnnnnnnnnnnnnnnnnnnnnnnnnnnnnnnnnnnnnnnnnnnnnnnnnnnnnnnnnnnnnnnnnnnnnnnnnnnnnnnnnnnnnnnnnnnnnnnnnnnnnnnnnnnnnnnnnnnnnnnnnnnnnnnnnnnnnnnnnnnnnnnnnnnnnnnnnnnnnnnnnnnnnnnnnnnnnnnnnnnnnnnnnnnnnnnnnnnnnnnnnnnnnnnnnnnnnnnnnnnnnnnnnnnnnnnnnnnnnnnnnnnnnnnnnnnnnnnnnnnnnnnnnnnnnnnnnnnnnnnnnnnnnnnnnnnnnnnnnnnnnnnnnnnnnnnnnnnnnnnnnnnnnnnnnnnnnnnnnnnnnnnnnnnnnnnnnnnnnnnnnnnnnnnnnnnnnnnnnnnnnnnnnnnnnnnnnnnnnnnnnnnnnnnnnnnnnnnnnnnnnnnnnnnnnnnnnnnnnnnnnnnnnnnnnnnnnnnnnnnnnnnnnnnnnnnnnnnnnnnnnnnnnnnnnnnnnnnnnnnnnnnnnnnnnnnnnnnnnnnnnnnnnnnnnnnnnnnnnnnnnnnnnnnnnnnnnnnnnnnnnnnnnnnnnnnnnnnnnnnnnnnnnnnnnnnnnnnnnnnnnnnnnnnnnnnnnnnnnnnnnnnnnnnnnnnnnnnnnnnnnnnnnnnnnnnnnnnnnnnnnnnnnnnnnnnnnnnnnnnnnnnnnnnnnnnnnnnnnnnnnnnnnnnnnnnnnnnnnnnnnnnnnnnnnnnnnnnnnnnnnnnnnnnnnnnnnnnnnnnnnnnnnnnnnnnnnnnnnnnnnnnnnnnnnnnnnnnnnnnnnnnnnnnnnnnnnnnnnnnnnnnnnnnnnnnnnnnnnnnnnnnnnnnnnnnnnnnnnnnnnnnnnnnnnnnnnnnnnnnnnnnnnnnnnnnnnnnnnnnnnnnnnnnnnnnnnnnnnnnnnnnnnnnnnnnnnnnnnnnnnnnnnnnnnnnnnnnnnnnnnnnnnnnnnnnnnnnnnnnnnnnnnnnnnnnnnnnnnnnnnnnnnnnnnnnnnnnnnnnnnnnnnnnnnnnnnnnnnnnnnnnnnnnnnnnnnnnnnnnnnnnnnnnnnnnnnnnnnnnnnnnnnnnnnnnnnnnnnnnnnnnnnnnnnnnnnnnnnnnnnnnnnnnnnnnnnnnnnnnnnnnnnnnnnnnnnnnnnnnnnnnnnnnnnnnnnnnnnnnnnnnnnnnnnnnnnnnnnnnnnnnnnnnnnnnnnnnnnnnnnnnnnnnnnnnnnnnnnnnnnnnnnnnnnnnnnnnnnnnnnnnnnnnnnnnnnnnnnnnnnnnnnnnnnnnnnnnnnnnnnnnnnnnnnnnnnnnnnnnnnnnnnnnnnnnnnnnnnnnnnnnnnnnnnnnnnnnnnnnnnnnnnnnnnnnnnnnnnnnnnnnnnnnnnnnnnnnnnnnnnnnnnnnnnnnnnnnnnnnnnnnnnnnnnnnnnnnnnnnnnnnnnnnnnnnnnnnnnnnnnnnnnnnnnnnnnnnnnnnnnnnnnnnnnnnnnnnnnnnnnnnnnnnnnnnnnnnnnnnnnnnnnnnnnnnnnnnnnnnnnnnnnnnnnnnnnnnnnnnnnnnnnnnnnnnnnnnnnnnnnnnnnnnnnnnnnnnnnnnnnnnnnnnnnnnnnnnnnnnnnnnnnnnnnnnnnnnnnnnnnnnnnnnnnnnnnnnnnnnnnnnnnnnnnnnnnnnnnnnnnnnnnnnnnnnnnnnnnnnnnnnnnnnnnnnnnnnnnnnnnnnnnnnnnnnnnnnnnnnnnnnnnnnnnnnnnnnnnnnnnnnnnnnnnnnnnnnnnnnnnnnnnnnnnnnnnnnnnnnnnnnnnnnnnnnnnnnnnnnnnnnnnnnnnnnnnnnnnnnnnnnnnnnnnnnnnnnnnnnnnnnnnnnnnnnnnnnnnnnnnnnnnnnnnnnnnnnnnnnnnnnnnnnnnnnnnnnnnnnnnnnnnnnnnnnnnnnnnnnnnnnnnnnnnnnnnnnnnnnnnnnnnnnnnnnnnnnnnnnnnnnnnnnnnnnnnnnnnnnnnnnnnnnnnnnnnnnnnnnnnnnnnnnnnnnnnnnnnnnnnnnnnnnnnnnnnnnnnnnnnnnnnnnnnnnnnnnnnnnnnnnnnnnnnnnnnnnnnnnnnnnnnnnnnnnnnnnnnnnnnnnnnnnnnnnnnnnnnnnnnnnnnnnnnnnnnnnnnnnnnnnnnnnnnnnnnnnnnnnnnnnnnnnnnnnnnnnnnnnnnnnnnnnnnnnnnnnnnnnnnnnnnnnnnnnnnnnnnnnnnnnnnnnnnnnnnnnnnnnnnnnnnnnnnnnnnnnnnnnnnnnnnnnnnnnnnnnnnnnnnnnnnnnnnnnnnnnnnnnnnnnnnnnnnnnnnnnnnnnnnnnnnnnnnnnnnnnnnnnnnnnnnnnnnnnnnnnnnnnnnnnnnnnnnnnnnnnnnnnnnnnnnnnnnnnnnnnnnnnnnnnnnnnnnnnnnnnnnnnnnnnnnnnnnnnnnnnnnnnnnnnnnnnnnnnnnnnnnnnnnnnnnnnnnnnnnnnnnnnnnnnnnnnnnnnnnnnnnnnnnnnnnnnnnnnnnnnnnnnnnnnnnnnnnnnnnnnnnnnnnnnnnnnnnnnnnnnnnnnnnnnnnnnnnnnnnnnnnnnnnnnnnnnnnnnnnnnnnnnnnnnnnnnnnnnnnnnnnnnnnnnnnnnnnnnnnnnnnnnnnnnnnnnnnnnnnnnnnnnnnnnnnnnnnnnnnnnnnnnnnnnnnnnnnnnnnnnnnnnnnnnnnnnnnnnnnnnnnnnnnnnnnnnnnnnnnnnnnnnnnnnnnnnnnnnnnnnnnnnnnnnnnnnnnnnnnnnnnnnnnnnnnnnnnnnnnnnnnnnnnnnnnnnnnnnnnnnnnnnnnnnnnnnnnnnnnnnnnnnnnnnnnnnnnnnnnnnnnnnnnnnnnnnnnnnnnnnnnnnnnnnnnnnnnnnnnnnnnnnnnnnnnnnnnnnnnnnnnnnnnnnnnnnnnnnnnnnnnnnnnnnnnnnnnnnnnnnnnnnnnnnnnnnnnnnnnnnnnnnnnnnnnnnnnnnnnnnnnnnnnnnnnnnnnnnnnnnnnnnnnnnnnnnnnnnnnnnnnnnnnnnnnnnnnnnnnnnnnnnnnnnnnnnnnnnnnnnnnnnnnnnnnnnnnnnnnnnnnnnnnnnnnnnnnnnnnnnnnnnnnnnnnnnnnnnnnnnnnnnnnnnnnnnnnnnnnnnnnnnnnnnnnnnnnnnnnnnnnnnnnnnnnnnnnnnnnnnnnnnnnnnnnnnnnnnnnnnnnnnnnnnnnnnnnnnnnnnnnnnnnnnnnnnnnnnnnnnnnnnnnnnnnnnnnnnnnnnnnnnnnnnnnnnnnnnnnnnnnnnnnnnnnnnnnnnnnnnnnnnnnnnnnnnnnnnnnnnnnnnnnnnnnnnnnnnnnnnnnnnnnnnnnnnnnnnnnnnnnnnnnnnnnnnnnnnnnnnnnnnnnnnnnnnnnnnnnnnnnnnnnnnnnnnnnnnnnnnnnnnnnnnnnnnnnnnnnnnnnnnnnnnnnnnnnnnnnnnnnnnnnnnnnnnnnnnnnnnnnnnnnnnnnnnnnnnnnnnnnnnnnnnnnnnnnnnnnnnnnnnnnnnnnnnnnnnnnnnnnnnnnnnnnnnnnnnnnnnnnnnnnnnnnnnnnnnnnnnnnnnnnnnnnnnnnnnnnnnnnnnnnnnnnnnnnnnnnnnnnnnnnnnnnnnnnnnnnnnnnnnnnnnnnnnnnnnnnnnnnnnnnnnnnnnnnnnnnnnnnnnnnnnnnnnnnnnnnnnnnnnnnnnnnnnnnnnnnnnnnnnnnnnnnnnnnnnnnnnnnnnnnnnnnnnnnnnnnnnnnnnnnnnnnnnnnnnnnnnnnnnnnnnnnnnnnnnnnnnnnnnnnnnnnnnnnnnnnnnnnnnnnnnnnnnnnnnnnnnnnnnnnnnnnnnnnnnnnnnnnnnnnnnnnnnnnnnnnnnnnnnnnnnnnnnnnnnnnnnnnnnnnnnnnnnnnnnnnnnnnnnnnnnnnnnnnnnnnnnnnnnnnnnnnnnnnnnnnnnnnnnnnnnnnnnnnnnnnnnnnnnnnnnnnnnnnnnnnnnnnnnnnnnnnnnnnnnnnnnnnnnnnnnnnnnnnnnnnnnnnnnnnnnnnnnnnnnnnnnnnnnnnnnnnnnnnnnnnnnnnnnnnnnnnnnnnnnnnnnnnnnnnnnnnnnnnnnnnnnnnnnnnnnnnnnnnnnnnnnnnnnnnnnnnnnnnnnnnnnnnnnnnnnnnnnnnnnnnnnnnnnnnnnnnnnnnnnnnnnnnnnnnnnnnnnnnnnnnnnnnnnnnnnnnnnnnnnnnnnnnnnnnnnnnnnnnnnnnnnnnnnnnnnnnnnnnnnnnnnnnnnnnnnnnnnnnnnnnnnnnnnnnnnnnnnnnnnnnnnnnnnnnnnnnnnnnnnnnnnnnnnnnnnnnnnnnnnnnnnnnnnnnnnnnnnnnnnnnnnnnnnnnnnnnnnnnnnnnnnnnnnnnnnnnnnnnnnnnnnnnnnnnnnnnnnnnnnnnnnnnnnnnnnnnnnnnnnnnnnnnnnnnnnnnnnnnnnnnnnnnnnnnnnnnnnnnnnnnnnnnnnnnnnnnnnnnnnnnnnnnnnnnnnnnnnnnnnnnnnnnnnnnnnnnnnnnnnnnnnnnnnnnnnnnnnnnnnnnnnnnnnnnnnnnnnnnnnnnnnnnnnnnnnnnnnnnnnnnnnnnnnnnnnnnnnnnnnnnnnnnnnnnnnnnnnnnnnnnnnnnnnnnnnnnnnnnnnnnnnnnnnnnnnnnnnnnnnnnnnnnnnnnnnnnnnnnnnnnnnnnnnnnnnnnnnnnnnnnnnnnnnnnnnnnnnnnnnnnnnnnnnnnnnnnnnnnnnnnnnnnnnnnnnnnnnnnnnnnnnnnnnnnnnnnnnnnnnnnnnnnnnnnnnnnnnnnnnnnnnnnnnnnnnnnnnnnnnnnnnnnnnnnnnnnnnnnnnnnnnnnnnnnnnnnnnnnnnnnnnnnnnnnnnnnnnnnnnnnnnnnnnnnnnnnnnnnnnnnnnnnnnnnnnnnnnnnnnnnnnnnnnnnnnnnnnnnnnnnnnnnnnnnnnnnnnnnnnnnnnnnnnnnnnnnnnnnnnnnnnnnnnnnnnnnnnnnnnnnnnnnnnnnnnnnnnnnnnnnnnnnnnnnnnnnnnnnnnnnnnnnnnnnnnnnnnnnnnnnnnnnnnnnnnnnnnnnnnnnnnnnnnnnnnnnnnnnnnnnnnnnnnnnnnnnnnnnnnnnnnnnnnnnnnnnnnnnnnnnnnnnnnnnnnnnnnnnnnnnnnnnnnnnnnnnnnnnnnnnnnnnnnnnnnnnnnnnnnnnnnnnnnnnnnnnnnnnnnnnnnnnnnnnnnnnnnnnnnnnnnnnnnnnnnnnnnnnnnnnnnnnnnnnnnnnnnnnnnnnnnnnnnnnnnnnnnnnnnnnnnnnnnnnnnnnnnnnnnnnnnnnnnnnnnnnnnnnnnnnnnnnnnnnnnnnnnnnnnnnnnnnnnnnnnnnnnnnnnnnnnnnnnnnnnnnnnnnnnnnnnnnnnnnnnnnnnnnnnnnnnnnnnnnnnnnnnnnnnnnnnnnnnnnnnnnnnnnnnnnnnnnnnnnnnnnnnnnnnnnnnnnnnnnnnnnnnnnnnnnnnnnnnnnnnnnnnnnnnnnnnnnnnnnnnnnnnnnnnnnnnnnnnnnnnnnnnnnnnnnnnnnnnnnnnnnnnnnnnnnnnnnnnnnnnnnnnnnnnnnnnnnnnnnnnnnnnnnnnnnnnnnnnnnnnnnnnnnnnnnnnnnnnnnnnnnnnnnnnnnnnnnnnnnnnnnnnnnnnnnnnnnnnnnnnnnnnnnnnnnnnnnnnnnnnnnnnnnnnnnnnnnnnnnnnnnnnnnnnnnnnnnnnnnnnnnnnnnnnnnnnnnnnnnnnnnnnnnnnnnnnnnnnnnnnnnnnnnnnnnnnnnnnnnnnnnnnnnnnnnnnnnnnnnnnnnnnnnnnnnnnnnnnnnnnnnnnnnnnnnnnnnnnnnnnnnnnnnnnnnnnnnnnnnnnnnnnnnnnnnnnnnnnnnnnnnnnnnnnnnnnnnnnnnnnnnnnnnnnnnnnnnnnnnnnnnnnnnnnnnnnnnnnnnnnnnnnnnnnnnnnnnnnnnnnnnnnnnnnnnnnnnnnnnnnnnnnnnnnnnnnnnnnnnnnnnnnnnnnnnnnnnnnnnnnnnnnnnnnnnnnnnnnnnnnnnnnnnnnnnnnnnnnnnnnnnnnnnnnnnnnnnnnnnnnnnnnnnnnnnnnnnnnnnnnnnnnnnnnnnnnnnnnnnnnnnnnnnnnnnnnnnnnnnnnnnnnnnnnnnnnnnnnnnnnnnnnnnnnnnnnnnnnnnnnnnnnnnnnnnnnnnnnnnnnnnnnnnnnnnnnnnnnnnnnnnnnnnnnnnnnnnnnnnnnnnnnnnnnnnnnnnnnnnnnnnnnnnnnnnnnnnnnnnnnnnnnnnnnnnnnnnnnnnnnnnnnnnnnnnnnnnnnnnnnnnnnnnnnnnnnnnnnnnnnnnnnnnnnnnnnnnnnnnnnnnnnnnnnnnnnnnnnnnnnnnnnnnnnnnnnnnnnnnnnnnnnnnnnnnnnnnnnnnnnnnnnnnnnnnnnnnnnnnnnnnnnnnnnnnnnnnnnnnnnnnnnnnnnnnnnnnnnnnnnnnnnnnnnnnnnnnnnnnnnnnnnnnnnnnnnnnnnnnnnnnnnnnnnnnnnnnnnnnnnnnnnnnnnnnnnnnnnnnnnnnnnnnnnnnnnnnnnnnnnnnnnnnnnnnnnnnnnnnnnnnnnnnnnnnnnnnnnnnnnnnnnnnnnnnnnnnnnnnnnnnnnnnnnnnnnnnnnnnnnnnnnnnnnnnnnnnnnnnnnnnnnnnnnnnnnnnnnnnnnnnnnnnnnnnnnnnnnnnnnnnnnnnnnnnnnnnnnnnnnnnnnnnnnnnnnnnnnnnnnnnnnnnnnnnnnnnnnnnnnnnnnnnnnnnnnnnnnnnnnnnnnnnnnnnnnnnnnnnnnnnnnnnnnnnnnnnnnnnnnnnnnnnnnnnnnnnnnnnnnnnnnnnnnnnnnnnnnnnnnnnnnnnnnnnnnnnnnnnnnnnnnnnnnnnnnnnnnnnnnnnnnnnnnnnnnnnnnnnnnnnnnnnnnnnnnnnnnnnnnnnnnnnnnnnnnnnnnnnnnnnnnnnnnnnnnnnnnnnnnnnnnnnnnnnnnnnnnnnnnnnnnnnnnnnnnnnnnnnnnnnnnnnnnnnnnnnnnnnnnnnnnnnnnnnnnnnnnnnnnnnnnnnnnnnnnnnnnnnnnnnnnnnnnnnnnnnnnnnnnnnnnnnnnnnnnnnnnnnnnnnnnnnnnnnnnnnnnnnnnnnnnnnnnnnnnnnnnnnnnnnnnnnnnnnnnnnnnnnnnnnnnnnnnnnnnnnnnnnnnnnnnnnnnnnnnnnnnnnnnnnnnnnnnnnnnnnnnnnnnnnnnnnnnnnnnnnnnnnnnnnnnnnnnnnnnnnnnnnnnnnnnnnnnnnnnnnnnnnnnnnnnnnnnnnnnnnnnnnnnnnnnnnnnnnnnnnnnnnnnnnnnnnnnnnnnnnnnnnnnnnnnnnnnnnnnnnnnnnnnnnnnnnnnnnnnnnnnnnnnnnnnnnnnnnnnnnnnnnnnnnnnnnnnnnnnnnnnnnnnnnnnnnnnnnnnnnnnnnnnnnnnnnnnnnnnnnnnnnnnnnnnnnnnnnnnnnnnnnnnnnnnnnnnnnnnnnnnnnnnnnnnnnnnnnnnnnnnnnnnnnnnnnnnnnnnnnnnnnnnnnnnnnnnnnnnnnnnnnnnnnnnnnnnnnnnnnnnnnnnnnnnnnnnnnnnnnnnnnnnnnnnnnnnnnnnnnnnnnnnnnnnnnnnnnnnnnnnnnnnnnnnnnnnnnnnnnnnnnnnnnnnnnnnnnnnnnnnnnnnnnnnnnnnnnnnnnnnnnnnnnnnnnnnnnnnnnnnnnnnnnnnnnnnnnnnnnnnnnnnnnnnnnnnnnnnnnnnnnnnnnnnnnnnnnnnnnnnnnnnnnnnnnnnnnnnnnnnnnnnnnnnnnnnnnnnnnnnnnnnnnnnnnnnnnnnnnnnnnnnnnnnnnnnnnnnnnnnnnnnnnnnnnnnnnnnnnnnnnnnnnnnnnnnnnnnnnnnnnnnnnnnnnnnnnnnnnnnnnnnnnnnnnnnnnnnnnnnnnnnnnnnnnnnnnnnnnnnnnnnnnnnnnnnnnnnnnnnnnnnnnnnnnnnnnnnnnnnnnnnnnnnnnnnnnnnnnnnnnnnnnnnnnnnnnnnnnnnnnnnnnnnnnnnnnnnnnnnnnnnnnnnnnnnnnnnnnnnnnnnnnnnnnnnnnnnnnnnnnnnnnnnnnnnnnnnnnnnnnnnnnnnnnnnnnnnnnnnnnnnnnnnnnnnnnnnnnnnnnnnnnnnnnnnnnnnnnnnnnnnnnnnnnnnnnnnnnnnnnnnnnnnnnnnnnnnnnnnnnnnnnnnnnnnnnnnnnnnnnnnnnnnnnnnnnnnnnnnnnnnnnnnnnnnnnnnnnnnnnnnnnnnnnnnnnnnnnnnnnnnnnnnnnnnnnnnnnnnnnnnnnnnnnnnnnnnnnnnnnnnnnnnnnnnnnnnnnnnnnnnnnnnnnnnnnnnnnnnnnnnnnnnnnnnnnnnnnnnnnnnnnnnnnnnnnnnnnnnnnnnnnnnnnnnnnnnnnnnnnnnnnnnnnnnnnnnnnnnnnnnnnnnnnnnnnnnnnnnnnnnnnnnnnnnnnnnnnnnnnnnnnnnnnnnnnnnnnnnnnnnnnnnnnnnnnnnnnnnnnnnnnnnnnnnnnnnnnnnnnnnnnnnnnnnnnnnnnnnnnnnnnnnnnnnnnnnnnnnnnnnnnnnnnnnnnnnnnnnnnnnnnnnnnnnnnnnnnnnnnnnnnnnnnnnnnnnnnnnnnnnnnnnnnnnnnnnnnnnnnnnnnnnnnnnnnnnnnnnnnnnnnnnnnnnnnnnnnnnnnnnnnnnnnnnnnnnnnnnnnnnnnnnnnnnnnnnnnnnnnnnnnnnnnnnnnnnnnnnnnnnnnnnnnnnnnnnnnnnnnnnnnnnnnnnnnnnnnnnnnnnnnnnnnnnnnnnnnnnnnnnnnnnnnnnnnnnnnnnnnnnnnnnnnnnnnnnnnnnnnnnnnnnnnnnnnnnnnnnnnnnnnnnnnnnnnnnnnnnnnnnnnnnnnnnnnnnnnnnnnnnnnnnnnnnnnnnnnnnnnnnnnnnnnnnnnnnnnnnnnnnnnnnnnnnnnnnnnnnnnnnnnnnnnnnnnnnnnnnnnnnnnnnnnnnnnnnnnnnnnnnnnnnnnnnnnnnnnnnnnnnnnnnnnnnnnnnnnnnnnnnnnnnnnnnnnnnnnnnnnnnnnnnnnnnnnnnnnnnnnnnnnnnnnnnnnnnnnnnnnnnnnnnnnnnnnnnnnnnnnnnnnnnnnnnnnnnnnnnnnnnnnnnnnnnnnnnnnnnnnnnnnnnnnnnnnnnnnnnnnnnnnnnnnnnnnnnnnnnnnnnnnnnnnnnnnnnnnnnnnnnnnnnnnnnnnnnnnnnnnnnnnnnnnnnnnnnnnnnnnnnnnnnnnnnnnnnnnnnnnnnnnnnnnnnnnnnnnnnnnnnnnnnnnnnnnnnnnnnnnnnnnnnnnnnnnnnnnnnnnnnnnnnnnnnnnnnnnnnnnnnnnnnnnnnnnnnnnnnnnnnnnnnnnnnnnnnnnnnnnnnnnnnnnnnnnnnnnnnnnnnnnnnnnnnnnnnnnnnnnnnnnnnnnnnnnnnnnnnnnnnnnnnnnnnnnnnnnnnnnnnnnnnnnnnnnnnnnnnnnnnnnnnnnnnnnnnnnnnnnnnnnnnnnnnnnnnnnnnnnnnnnnnnnnnnnnnnnnnnnnnnnnnnnnnnnnnnnnnnnnnnnnnnnnnnnnnnnnnnnnnnnnnnnnnnnnnnnnnnnnnnnnnnnnnnnnnnnnnnnnnnnnnnnnnnnnnnnnnnnnnnnnnnnnnnnnnnnnnnnnnnnnnnnnnnnnnnnnnnnnnnnnnnnnnnnnnnnnnnnnnnnnnnnnnnnnnnnnnnnnnnnnnnnnnnnnnnnnnnnnnnnnnnnnnnnnnnnnnnnnnnnnnnnnnnnnnnnnnnnnnnnnnnnnnnnnnnnnnnnnnnnnnnnnnnnnnnnnnnnnnnnnnnnnnnnnnnnnnnnnnnnnnnnnnnnnnnnnnnnnnnnnnnnnnnnnnnnnnnnnnnnnnnnnnnnnnnnnnnnnnnnnnnnnnnnnnnnnnnnnnnnnnnnnnnnnnnnnnnnnnnnnnnnnnnnnnnnnnnnnnnnnnnnnnnnnnnnnnnnnnnnnnnnnnnnnnnnnnnnnnnnnnnnnnnnnnnnnnnnnnnnnnnnnnnnnnnnnnnnnnnnnnnnnnnnnnnnnnnnnnnnnnnnnnnnnnnnnnnnnnnnnnnnnnnnnnnnnnnnnnnnnnnnnnnnnnnnnnnnnnnnnnnnnnnnnnnnnnnnnnnnnnnnnnnnnnnnnnnnnnnnnnnnnnnnnnnnnnnnnnnnnnnnnnnnnnnnnnnnnnnnnnnnnnnnnnnnnnnnnnnnnnnnnnnnnnnnnnnnnnnnnnnnnnnnnnnnnnnnnnnnnnnnnnnnnnnnnnnnnnnnnnnnnnnnnnnnnnnnnnnnnnnnnnnnnnnnnnnnnnnnnnnnnnnnnnnnnnnnnnnnnnnnnnnnnnnnnnnnnnnnnnnnnnnnnnnnnnnnnnnnnnnnnnnnnnnnnnnnnnnnnnnnnnnnnnnnnnnnnnnnnnnnnnnnnnnnnnnnnnnnnnnnnnnnnnnnnnnnnnnnnnnnnnnnnnnnnnnnnnnnnnnnnnnnnnnnnnnnnnnnnnnnnnnnnnnnnnnnnnnnnnnnnnnnnnnnnnnnnnnnnnnnnnnnnnnnnnnnnnnnnnnnnnnnnnnnnnnnnnnnnnnnnnnnnnnnnnnnnnnnnnnnnnnnnnnnnnnnnnnnnnnnnnnnnnnnnnnnnnnnnnnnnnnnnnnnnnnnnnnnnnnnnnnnnnnnnnnnnnnnnnnnnnnnnnnnnnnnnnnnnnnnnnnnnnnnnnnnnnnnnnnnnnnnnnnnnnnnnnnnnnnnnnnnnnnnnnnnnnnnnnnnnnnnnnnnnnnnnnnnnnnnnnnnnnnnnnnnnnnnnnnnnnnnnnnnnnnnnnnnnnnnnnnnnnnnnnnnnnnnnnnnnnnnnnnnnnnnnnnnnnnnnnnnnnnnnnnnnnnnnnnnnnnnnnnnnnnnnnnnnnnnnnnnnnnnnnnnnnnnnnnnnnnnnnnnnnnnnnnnnnnnnnnnnnnnnnnnnnnnnnnnnnnnnnnnnnnnnnnnnnnnnnnnnnnnnnnnnnnnnnnnnnnnnnnnnnnnnnnnnnnnnnnnnnnnnnnnnnnnnnnnnnnnnnnnnnnnnnnnnnnnnnnnnnnnnnnnnnnnnnnnnnnnnnnnnnnnnnnnnnnnnnnnnnnnnnnnnnnnnnnnnnnnnnnnnnnnnnnnnnnnnnnnnnnnnnnnnnnnnnnnnnnnnnnnnnnnnnnnnnnnnnnnnnnnnnnnnnnnnnnnnnnnnnnnnnnnnnnnnnnnnnnnnnnnnnnnnnnnnnnnnnnnnnnnnnnnnnnnnnnnnnnnnnnnnnnnnnnnnnnnnnnnnnnnnnnnnnnnnnnnnnnnnnnnnnnnnnnnnnnnnnnnnnnnnnnnnnnnnnnnnnnnnnnnnnnnnnnnnnnnnnnnnnnnnnnnnnnnnnnnnnnnnnnnnnnnnnnnnnnnnnnnnnnnnnnnnnnnnnnnnnnnnnnnnnnnnnnnnnnnnnnnnnnnnnnnnnnnnnnnnnnnnnnnnnnnnnnnnnnnnnnnnnnnnnnnnnnnnnnnnnnnnnnnnnnnnnnnnnnnnnnnnnnnnnnnnnnnnnnnnnnnnnnnnnnnnnnnnnnnnnnnnnnnnnnnnnnnnnnnnnnnnnnnnnnnnnnnnnnnnnnnnnnnnnnnnnnnnnnnnnnnnnnnnnnnnnnnnnnnnnnnnnnnnnnnnnnnnnnnnnnnnnnnnnnnnnnnnnnnnnnnnnnnnnnnnnnnnnnnnnnnnnnnnnnnnnnnnnnnnnnnnnnnnnnnnnnnnnnnnnnnnnnnnnnnnnnnnnnnnnnnnnnnnnnnnnnnnnnnnnnnnnnnnnnnnnnnnnnnnnnnnnnnnnnnnnnnnnnnnnnnnnnnnnnnnnnnnnnnnnnnnnnnnnnnnnnnnnnnnnnnnnnnnnnnnnnnnnnnnnnnnnnnnnnnnnnnnnnnnnnnnnnnnnnnnnnnnnnnnnnnnnnnnnnnnnnnnnnnnnnnnnnnnnnnnnnnnnnnnnnnnnnnnnnnnnnnnnnnnnnnnnnnnnnnnnnnnnnnnnnnnnnnnnnnnnnnnnnnnnnnnnnnnnnnnnnnnnnnnnnnnnnnnnnnnnnnnnnnnnnnnnnnnnnnnnnnnnnnnnnnnnnnnnnnnnnnnnnnnnnnnnnnnnnnnnnnnnnnnnnnnnnnnnnnnnnnnnnnnnnnnnnnnnnnnnnnnnnnnnnnnnnnnnnnnnnnnnnnnnnnnnnnnnnnnnnnnnnnnnnnnnnnnnnnnnnnnnnnnnnnnnnnnnnnnnnnnnnnnnnnnnnnnnnnnnnnnnnnnnnnnnnnnnnnnnnnnnnnnnnnnnnnnnnnnnnnnnnnnnnnnnnnnnnnnnnnnnnnnnnnnnnnnnnnnnnnnnnnnnnnnnnnnnnnnnnnnnnnnnnnnnnnnnnnnnnnnnnnnnnnnnnnnnnnnnnnnnnnnnnnnnnnnnnnnnnnnnnnnnnnnnnnnnnnnnnnnnnnnnnnnnnnnnnnnnnnnnnnnnnnnnnnnnnnnnnnnnnnnnnnnnnnnnnnnnnnnnnnnnnnnnnnnnnnnnnnnnnnnnnnnnnnnnnnnnnnnnnnnnnnnnnnnnnnnnnnnnnnnnnnnnnnnnnnnnnnnnnnnnnnnnnnnnnnnnnnnnnnnnnnnnnnnnnnnnnnnnnnnnnnnnnnnnnnnnnnnnnnnnnnnnnnnnnnnnnnnnnnnnnnnnnnnnnnnnnnnnnnnnnnnnnnnnnnnnnnnnnnnnnnnnnnnnnnnnnnnnnnnnnnnnnnnnnnnnnnnnnnnnnnnnnnnnnnnnnnnnnnnnnnnnnnnnnnnnnnnnnnnnnnnnnnnnnnnnnnnnnnnnnnnnnnnnnnnnnnnnnnnnnnnnnnnnnnnnnnnnnnnnnnnnnnnnnnnnnnnnnnnnnnnnnnnnnnnnnnnnnnnnnnnnnnnnnnnnnnnnnnnnnnnnnnnnnnnnnnnnnnnnnnnnnnnnnnnnnnnnnnnnnnnnnnnnnnnnnnnnnnnnnnnnnnnnnnnnnnnnnnnnnnnnnnnnnnnnnnnnnnnnnnnnnnnnnnnnnnnnnnnnnnnnnnnnnnnnnnnnnnnnnnnnnnnnnnnnnnnnnnnnnnnnnnnnnnnnnnnnnnnnnnnnnnnnnnnnnnnnnnnnnnnnnnnnnnnnnnnnnnnnnnnnnnnnnnnnnnnnnnnnnnnnnnnnnnnnnnnnnnnnnnnnnnnnnnnnnnnnnnnnnnnnnnnnnnnnnnnnnnnnnnnnnnnnnnnnnnnnnnnnnnnnnnnnnnnnnnnnnnnnnnnnnnnnnnnnnnnnnnnnnnnnnnnnnnnnnnnnnnnnnnnnnnnnnnnnnnnnnnnnnnnnnnnnnnnnnnnnnnnnnnnnnnnnnnnnnnnnnnnnnnnnnnnnnnnnnnnnnnnnnnnnnnnnnnnnnnnnnnnnnnnnnnnnnnnnnnnnnnnnnnnnnnnnnnnnnnnnnnnnnnnnnnnnnnnnnnnnnnnnnnnnnnnnnnnnnnnnnnnnnnnnnnnnnnnnnnnnnnnnnnnnnnnnnnnnnnnnnnnnnnnnnnnnnnnnnnnnnnnnnnnnnnnnnnnnnnnnnnnnnnnnnnnnnnnnnnnnnnnnnnnnnnnnnnnnnnnnnnnnnnnnnnnnnnnnnnnnnnnnnnnnnnnnnnnnnnnnnnnnnnnnnnnnnnnnnnnnnnnnnnnnnnnnnnnnnnnnnnnnnnnnnnnnnnnnnnnnnnnnnnnnnnnnnnnnnnnnnnnnnnnnnnnnnnnnnnnnnnnnnnnnnnnnnnnnnnnnnnnnnnnnnnnnnnnnnnnnnnnnnnnnnnnnnnnnnnnnnnnnnnnnnnnnnnnnnnnnnnnnnnnnnnnnnnnnnnnnnnnnnnnnnnnnnnnnnnnnnnnnnnnnnnnnnnnnnnnnnnnnnnnnnnnnnnnnnnnnnnnnnnnnnnnnnnnnnnnnnnnnnnnnnnnnnnnnnnnnnnnnnnnnnnnnnnnnnnnnnnnnnnnnnnnnnnnnnnnnnnnnnnnnnnnnnnnnnnnnnnnnnnnnnnnnnnnnnnnnnnnnnnnnnnnnnnnnnnnnnnnnnnnnnnnnnnnnnnnnnnnnnnnnnnnnnnnnnnnnnnnnnnnnnnnnnnnnnnnnnnnnnnnnnnnnnnnnnnnnnnnnnnnnnnnnnnnnnnnnnnnnnnnnnnnnnnnnnnnnnnnnnnnnnnnnnnnnnnnnnnnnnnnnnnnnnnnnnnnnnnnnnnnnnnnnnnnnnnnnnnnnnnnnnnnnnnnnnnnnnnnnnnnnnnnnnnnnnnnnnnnnnnnnnnnnnnnnnnnnnnnnnnnnnnnnnnnnnnnnnnnnnnnnnnnnnnnnnnnnnnnnnnnnnnnnnnnnnnnnnnnnnnnnnnnnnnnnnnnnnnnnnnnnnnnnnnnnnnnnnnnnnnnnnnnnnnnnnnnnnnnnnnnnnnnnnnnnnnnnnnnnnnnnnnnnnnnnnnnnnnnnnnnnnnnnnnnnnnnnnnnnnnnnnnnnnnnnnnnnnnnnnnnnnnnnnnnnnnnnnnnnnnnnnnnnnnnnnnnnnnnnnnnnnnnnnnnnnnnnnnnnnnnnnnnnnnnnnnnnnnnnnnnnnnnnnnnnnnnnnnnnnnnnnnnnnnnnnnnnnnnnnnnnnnnnnnnnnnnnnnnnnnnnnnnnnnnnnnnnnnnnnnnnnnnnnnnnnnnnnnnnnnnnnnnnnnnnnnnnnnnnnnnnnnnnnnnnnnnnnnnnnnnnnnnnnnnnnnnnnnnnnnnnnnnnnnnnnnnnnnnnnnnnnnnnnnnnnnnnnnnnnnnnnnnnnnnnnnnnnnnnnnnnnnnnnnnnnnnnnnnnnnnnnnnnnnnnnnnnnnnnnnnnnnnnnnnnnnnnnnnnnnnnnnnnnnnnnnnnnnnnnnnnnnnnnnnnnnnnnnnnnnnnnnnnnnnnnnnnnnnnnnnnnnnnnnnnnnnnnnnnnnnnnnnnnnnnnnnnnnnnnnnnnnnnnnnnnnnnnnnnnnnnnnnnnnnnnnnnnnnnnnnnnnnnnnnnnnnnnnnnnnnnnnnnnnnnnnnnnnnnnnnnnnnnnnnnnnnnnnnnnnnnnnnnnnnnnnnnnnnnnnnnnnnnnnnnnnnnnnnnnnnnnnnnnnnnnnnnnnnnnnnnnnnnnnnnnnnnnnnnnnnnnnnnnnnnnnnnnnnnnnnnnnnnnnnnnnnnnnnnnnnnnnnnnnnnnnnnnnnnnnnnnnnnnnnnnnnnnnnnnnnnnnnnnnnnnnnnnnnnnnnnnnnnnnnnnnnnnnnnnnnnnnnnnnnnnnnnnnnnnnnnnnnnnnnnnnnnnnnnnnnnnnnnnnnnnnnnnnnnnnnnnnnnnnnnnnnnnnnnnnnnnnnnnnnnnnnnnnnnnnnnnnnnnnnnnnnnnnnnnnnnnnnnnnnnnnnnnnnnnnnnnnnnnnnnnnnnnnnnnnnnnnnnnnnnnnnnnnnnnnnnnnnnnnnnnnnnnnnnnnnnnnnnnnnnnnnnnnnnnnnnnnnnnnnnnnnnnnnnnnnnnnnnnnnnnnnnnnnnnnnnnnnnnnnnnnnnnnnnnnnnnnnnnnnnnnnnnnnnnnnnnnnnnnnnnnnnnnnnnnnnnnnnnnnnnnnnnnnnnnnnnnnnnnnnnnnnnnnnnnnnnnnnnnnnnnnnnnnnnnnnnnnnnnnnnnnnnnnnnnnnnnnnnnnnnnnnnnnnnnnnnnnnnnnnnnnnnnnnnnnnnnnnnnnnnnnnnnnnnnnnnnnnnnnnnnnnnnnnnnnnnnnnnnnnnnnnnnnnnnnnnnnnnnnnnnnnnnnnnnnnnnnnnnnnnnnnnnnnnnnnnnnnnnnnnnnnnnnnnnnnnnnnnnnnnnnnnnnnnnnnnnnnnnnnnnnnnnnnnnnnnnnnnnnnnnnnnnnnnnnnnnnnnnnnnnnnnnnnnnnnnnnnnnnnnnnnnnnnnnnnnnnnnnnnnnnnnnnnnnnnnnnnnnnnnnnnnnnnnnnnnnnnnnnnnnnnnnnnnnnnnnnnnnnnnnnnnnnnnnnnnnnnnnnnnnnnnnnnnnnnnnnnnnnnnnnnnnnnnnnnnnnnnnnnnnnnnnnnnnnnnnnnnnnnnnnnnnnnnnnnnnnnnnnnnnnnnnnnnnnnnnnnnnnnnnnnnnnnnnnnnnnnnnnnnnnnnnnnnnnnnnnnnnnnnnnnnnnnnnnnnnnnnnnnnnnnnnnnnnnnnnnnnnnnnnnnnnnnnnnnnnnnnnnnnnnnnnnnnnnnnnnnnnnnnnnnnnnnnnnnnnnnnnnnnnnnnnnnnnnnnnnnnnnnnnnnnnnnnnnnnnnnnnnnnnnnnnnnnnnnnnnnnnnnnnnnnnnnnnnnnnnnnnnnnnnnnnnnnnnnnnnnnnnnnnnnnnnnnnnnnnnnnnnnnnnnnnnnnnnnnnnnnnnnnnnnnnnnnnnnnnnnnnnnnnnnnnnnnnnnnnnnnnnnnnnnnnnnnnnnnnnnnnnnnnnnnnnnnnnnnnnnnnnnnnnnnnnnnnnnnnnnnnnnnnnnnnnnnnnnnnnnnnnnnnnnnnnnnnnnnnnnnnnnnnnnnnnnnnnnnnnnnnnnnnnnnnnnnnnnnnnnnnnnnnnnnnnnnnnnnnnnnnnnnnnnnnnnnnnnnnnnnnnnnnnnnnnnnnnnnnnnnnnnnnnnnnnnnnnnnnnnnnnnnnnnnnnnnnnnnnnnnnnnnnnnnnnnnnnnnnnnnnnnnnnnnnnnnnnnnnnnnnnnnnnnnnnnnnnnnnnnnnnnnnnnnnnnnnnnnnnnnnnnnnnnnnnnnnnnnnnnnnnnnnnnnnnnnnnnnnnnnnnnnnnnnnnnnnnnnnnnnnnnnnnnnnnnnnnnnnnnnnnnnnnnnnnnnnnnnnnnnnnnnnnnnnnnnnnnnnnnnnnnnnnnnnnnnnnnnnnnnnnnnnnnnnnnnnnnnnnnnnnnnnnnnnnnnnnnnnnnnnnnnnnnnnnnnnnnnnnnnnnnnnnnnnnnnnnnnnnnnnnnnnnnnnnnnnnnnnnnnnnnnnnnnnnnnnnnnnnnnnnnnnnnnnnnnnnnnnnnnnnnnnnnnnnnnnnnnnnnnnnnnnnnnnnnnnnnnnnnnnnnnnnnnnnnnnnnnnnnnnnnnnnnnnnnnnnnnnnnnnnnnnnnnnnnnnnnnnnnnnnnnnnnnnnnnnnnnnnnnnnnnnnnnnnnnnnnnnnnnnnnnnnnnnnnnnnnnnnnnnnnnnnnnnnnnnnnnnnnnnnnnnnnnnnnnnnnnnnnnnnnnnnnnnnnnnnnnnnnnnnnnnnnnnnnnnnnnnnnnnnnnnnnnnnnnnnnnnnnnnnnnnnnnnnnnnnnnnnnnnnnnnnnnnnnnnnnnnnnnnnnnnnnnnnnnnnnnnnnnnnnnnnnnnnnnnnnnnnnnnnnnnnnnnnnnnnnnnnnnnnnnnnnnnnnnnnnnnnnnnnnnnnnnnnnnnnnnnnnnnnnnnnnnnnnnnnnnnnnnnnnnnnnnnnnnnnnnnnnnnnnnnnnnnnnnnnnnnnnnnnnnnnnnnnnnnnnnnnnnnnnnnnnnnnnnnnnnnnnnnnnnnnnnnnnnnnnnnnnnnnnnnnnnnnnnnnnnnnnnnnnnnnnnnnnnnnnnnnnnnnnnnnnnnnnnnnnnnnnnnnnnnnnnnnnnnnnnnnnnnnnnnnnnnnnnnnnnnnnnnnnnnnnnnnnnnnnnnnnnnnnnnnnnnnnnnnnnnnnnnnnnnnnnnnnnnnnnnnnnnnnnnnnnnnnnnnnnnnnnnnnnnnnnnnnnnnnnnnnnnnnnnnnnnnnnnnnnnnnnnnnnnnnnnnnnnnnnnnnnnnnnnnnnnnnnnnnnnnnnnnnnnnnnnnnnnnnnnnnnnnnnnnnnnnnnnnnnnnnnnnnnnnnnnnnnnnnnnnnnnnnnnnnnnnnnnnnnnnnnnnnnnnnnnnnnnnnnnnnnnnnnnnnnnnnnnnnnnnnnnnnnnnnnnnnnnnnnnnnnnnnnnnnnnnnnnnnnnnnnnnnnnnnnnnnnnnnnnnnnnnnnnnnnnnnnnnnnnnnnnnnnnnnnnnnnnnnnnnnnnnnnnnnnnnnnnnnnnnnnnnnnnnnnnnnnnnnnnnnnnnnnnnnnnnnnnnnnnnnnnnnnnnnnnnnnnnnnnnnnnnnnnnnnnnnnnnnnnnnnnnnnnnnnnnnnnnnnnnnnnnnnnnnnnnnnnnnnnnnnnnnnnnnnnnnnnnnnnnnnnnnnnnnnnnnnnnnnnnnnnnnnnnnnnnnnnnnnnnnnnnnnnnnnnnnnnnnnnnnnnnnnnnnnnnnnnnnnnnnnnnnnnnnnnnnnnnnnnnnnnnnnnnnnnnnnnnnnnnnnnnnnnnnnnnnnnnnnnnnnnnnnnnnnnnnnnnnnnnnnnnnnnnnnnnnnnnnnnnnnnnnnnnnnnnnnnnnnnnnnnnnnnnnnnnnnnnnnnnnnnnnnnnnnnnnnnnnnnnnnnnnnnnnnnnnnnnnnnnnnnnnnnnnnnnnnnnnnnnnnnnnnnnnnnnnnnnnnnnnnnnnnnnnnnnnnnnnnnnnnnnnnnnnnnnnnnnnnnnnnnnnnnnnnnnnnnnnnnnnnnnnnnnnnnnnnnnnnnnnnnnnnnnnnnnnnnnnnnnnnnnnnnnnnnnnnnnnnnnnnnnnnnnnnnnnnnnnnnnnnnnnnnnnnnnnnnnnnnnnnnnnnnnnnnnnnnnnnnnnnnnnnnnnnnnnnnnnnnnnnnnnnnnnnnnnnnnnnnnnnnnnnnnnnnnnnnnnnnnnnnnnnnnnnnnnnnnnnnnnnnnnnnnnnnnnnnnnnnnnnnnnnnnnnnnnnnnnnnnnnnnnnnnnnnnnnnnnnnnnnnnnnnnnnnnnnnnnnnnnnnnnnnnnnnnnnnnnnnnnnnnnnnnnnnnnnnnnnnnnnnnnnnnnnnnnnnnnnnnnnnnnnnnnnnnnnnnnnnnnnnnnnnnnnnnnnnnnnnnnnnnnnnnnnnnnnnnnnnnnnnnnnnnnnnnnnnnnnnnnnnnnnnnnnnnnnnnnnnnnnnnnnnnnnnnnnnnnnnnnnnnnnnnnnnnnnnnnnnnnnnnnnnnnnnnnnnnnnnnnnnnnnnnnnnnnnnnnnnnnnnnnnnnnnnnnnnnnnnnnnnnnnnnnnnnnnnnnnnnnnnnnnnnnnnnnnnnnnnnnnnnnnnnnnnnnnnnnnnnnnnnnnnnnnnnnnnnnnnnnnnnnnnnnnnnnnnnnnnnnnnnnnnnnnnnnnnnnnnnnnnnnnnnnnnnnnnnnnnnnnnnnnnnnnnnnnnnnnnnnnnnnnnnnnnnnnnnnnnnnnnnnnnnnnnnnnnnnnnnnnnnnnnnnnnnnnnnnnnnnnnnnnnnnnnnnnnnnnnnnnnnnnnnnnnnnnnnnnnnnnnnnnnnnnnnnnnnnnnnnnnnnnnnnnnnnnnnnnnnnnnnnnnnnnnnnnnnnnnnnnnnnnnnnnnnnnnnnnnnnnnnnnnnnnnnnnnnnnnnnnnnnnnnnnnnnnnnnnnnnnnnnnnnnnnnnnnnnnnnnnnnnnnnnnnnnnnnnnnnnnnnnnnnnnnnnnnnnnnnnnnnnnnnnnnnnnnnnnnnnnnnnnnnnnnnnnnnnnnnnnnnnnnnnnnnnnnnnnnnnnnnnnnnnnnnnnnnnnnnnnnnnnnnnnnnnnnnnnnnnnnnnnnnnnnnnnnnnnnnnnnnnnnnnnnnnnnnnnnnnnnnnnnnnnnnnnnnnnnnnnnnnnnnnnnnnnnnnnnnnnnnnnnnnnnnnnnnnnnnnnnnnnnnnnnnnnnnnnnnnnnnnnnnnnnnnnnnnnnnnnnnnnnnnnnnnnnnnnnnnnnnnnnnnnnnnnnnnnnnnnnnnnnnnnnnnnnnnnnnnnnnnnnnnnnnnnnnnnnnnnnnnnnnnnnnnnnnnnnnnnnnnnnnnnnnnnnnnnnnnnnnnnnnnnnnnnnnnnnnnnnnnnnnnnnnnnnnnnnnnnnnnnnnnnnnnnnnnnnnnnnnnnnnnnnnnnnnnnnnnnnnnnnnnnnnnnnnnnnnnnnnnnnnnnnnnnnnnnnnnnnnnnnnnnnnnnnnnnnnnnnnnnnnnnnnnnnnnnnnnnnnnnnnnnnnnnnnnnnnnnnnnnnnnnnnnnnnnnnnnnnnnnnnnnnnnnnnnnnnnnnnnnnnnnnnnnnnnnnnnnnnnnnnnnnnnnnnnnnnnnnnnnnnnnnnnnnnnnnnnnnnnnnnnnnnnnnnnnnnnnnnnnnnnnnnnnnnnnnnnnnnnnnnnnnnnnnnnnnnnnnnnnnnnnnnnnnnnnnnnnnnnnnnnnnnnnnnnnnnnnnnnnnnnnnnnnnnnnnnnnnnnnnnnnnnnnnnnnnnnnnnnnnnnnnnnnnnnnnnnnnnnnnnnnnnnnnnnnnnnnnnnnnnnnnnnnnnnnnnnnnnnnnnnnnnnnnnnnnnnnnnnnnnnnnnnnnnnnnnnnnnnnnnnnnnnnnnnnnnnnnnnnnnnnnnnnnnnnnnnnnnnnnnnnnnnnnnnnnnnnnnnnnnnnnnnnnnnnnnnnnnnnnnnnnnnnnnnnnnnnnnnnnnnnnnnnnnnnnnnnnnnnnnnnnnnnnnnnnnnnnnnnnnnnnnnnnnnnnnnnnnnnnnnnnnnnnnnnnnnnnnnnnnnnnnnnnnnnnnnnnnnnnnnnnnnnnnnnnnnnnnnnnnnnnnnnnnnnnnnnnnnnnnnnnnnnnnnnnnnnnnnnnnnnnnnnnnnnnnnnnnnnnnnnnnnnnnnnnnnnnnnnnnnnnnnnnnnnnnnnnnnnnnnnnnnnnnnnnnnnnnnnnnnnnnnnnnnnnnnnnnnnnnnnnnnnnnnnnnnnnnnnnnnnnnnnnnnnnnnnnnnnnnnnnnnnnnnnnnnnnnnnnnnnnnnnnnnnnnnnnnnnnnnnnnnnnnnnnnnnnnnnnnnnnnnnnnnnnnnnnnnnnnnnnnnnnnnnnnnnnnnnnnnnnnnnnnnnnnnnnnnnnnnnnnnnnnnnnnnnnnnnnnnnnnnnnnnnnnnnnnnnnnnnnnnnnnnnnnnnnnnnnnnnnnnnnnnnnnnnnnnnnnnnnnnnnnnnnnnnnnnnnnnnnnnnnnnnnnnnnnnnnnnnnnnnnnnnnnnnnnnnnnnnnnnnnnnnnnnnnnnnnnnnnnnnnnnnnnnnnnnnnnnnnnnnnnnnnnnnnnnnnnnnnnnnnnnnnnnnnnnnnnnnnnnnnnnnnnnnnnnnnnnnnnnnnnnnnnnnnnnnnnnnnnnnnnnnnnnnnnnnnnnnnnnnnnnnnnnnnnnnnnnnnnnnnnnnnnnnnnnnnnnnnnnnnnnnnnnnnnnnnnnnnnnnnnnnnnnnnnnnnnnnnnnnnnnnnnnnnnnnnnnnnnnnnnnnnnnnnnnnnnnnnnnnnnnnnnnnnnnnnnnnnnnnnnnnnnnnnnnnnnnnnnnnnnnnnnnnnnnnnnnnnnnnnnnnnnnnnnnnnnnnnnnnnnnnnnnnnnnnnnnnnnnnnnnnnnnnnnnnnnnnnnnnnnnnnnnnnnnnnnnnnnnnnnnnnnnnnnnnnnnnnnnnnnnnnnnnnnnnnnnnnnnnnnnnnnnnnnnnnnnnnnnnnnnnnnnnnnnnnnnnnnnnnnnnnnnnnnnnnnnnnnnnnnnnnnnnnnnnnnnnnnnnnnnnnnnnnnnnnnnnnnnnnnnnnnnnnnnnnnnnnnnnnnnnnnnnnnnnnnnnnnnnnnnnnnnnnnnnnnnnnnnnnnnnnnnnnnnnnnnnnnnnnnnnnnnnnnnnnnnnnnnnnnnnnnnnnnnnnnnnnnnnnnnnnnnnnnnnnnnnnnnnnnnnnnnnnnnnnnnnnnnnnnnnnnnnnnnnnnnnnnnnnnnnnnnnnnnnnnnnnnnnnnnnnnnnnnnnnnnnnnnnnnnnnnnnnnnnnnnnnnnnnnnnnnnnnnnnnnnnnnnnnnnnnnnnnnnnnnnnnnnnnnnnnnnnnnnnnnnnnnnnnnnnnnnnnnnnnnnnnnnnnnnnnnnnnnnnnnnnnnnnnnnnnnnnnnnnnnnnnnnnnnnnnnnnnnnnnnnnnnnnnnnnnnnnnnnnnnnnnnnnnnnnnnnnnnnnnnnnnnnnnnnnnnnnnnnnnnnnnnnnnnnnnnnnnnnnnnnnnnnnnnnnnnnnnnnnnnnnnnnnnnnnnnnnnnnnnnnnnnnnnnnnnnnnnnnnnnnnnnnnnnnnnnnnnnnnnnnnnnnnnnnnnnnnnnnnnnnnnnnnnnnnnnnnnnnnnnnnnnnnnnnnnnnnnnnnnnnnnnnnnnnnnnnnnnnnnnnnnnnnnnnnnnnnnnnnnnnnnnnnnnnnnnnnnnnnnnnnnnnnnnnnnnnnnnnnnnnnnnnnnnnnnnnnnnnnnnnnnnnnnnnnnnnnnnnnnnnnnnnnnnnnnnnnnnnnnnnnnnnnnnnnnnnnnnnnnnnnnnnnnnnnnnnnnnnnnnnnnnnnnnnnnnnnnnnnnnnnnnnnnnnnnnnnnnnnnnnnnnnnnnnnnnnnnnnnnnnnnnnnnnnnnnnnnnnnnnnnnnnnnnnnnnnnnnnnnnnnnnnnnnnnnnnnnnnnnnnnnnnnnnnnnnnnnnnnnnnnnnnnnnnnnnnnnnnnnnnnnnnnnnnnnnnnnnnnnnnnnnnnnnnnnnnnnnnnnnnnnnnnnnnnnnnnnnnnnnnnnnnnnnnnnnnnnnnnnnnnnnnnnnnnnnnnnnnnnnnnnnnnnnnnnnnnnnnnnnnnnnnnnnnnnnnnnnnnnnnnnnnnnnnnnnnnnnnnnnnnnnnnnnnnnnnnnnnnnnnnnnnnnnnnnnnnnnnnnnnnnnnnnnnnnnnnnnnnnnnnnnnnnnnnnnnnnnnnnnnnnnnnnnnnnnnnnnnnnnnnnnnnnnnnnnnnnnnnnnnnnnnnnnnnnnnnnnnnnnnnnnnnnnnnnnnnnnnnnnnnnnnnnnnnnnnnnnnnnnnnnnnnnnnnnnnnnnnnnnnnnnnnnnnnnnnnnnnnnnnnnnnnnnnnnnnnnnnnnnnnnnnnnnnnnnnnnnnnnnnnnnnnnnnnnnnnnnnnnnnnnnnnnnnnnnnnnnnnnnnnnnnnnnnnnnnnnnnnnnnnnnnnnnnnnnnnnnnnnnnnnnnnnnnnnnnnnnnnnnnnnnnnnnnnnnnnnnnnnnnnnnnnnnnnnnnnnnnnnnnnnnnnnnnnnnnnnnnnnnnnnnnnnnnnnnnnnnnnnnnnnnnnnnnnnnnnnnnnnnnnnnnnnnnnnnnnnnnnnnnnnnnnnnnnnnnnnnnnnnnnnnnnnnnnnnnnnnnnnnnnnnnnnnnnnnnnnnnnnnnnnnnnnnnnnnnnnnnnnnnnnnnnnnnnnnnnnnnnnnnnnnnnnnnnnnnnnnnnnnnnnnnnnnnnnnnnnnnnnnnnnnnnnnnnnnnnnnnnnnnnnnnnnnnnnnnnnnnnnnnnnnnnnnnnnnnnnnnnnnnnnnnnnnnnnnnnnnnnnnnnnnnnnnnnnnnnnnnnnnnnnnnnnnnnnnnnnnnnnnnnnnnnnnnnnnnnnnnnnnnnnnnnnnnnnnnnnnnnnnnnnnnnnnnnnnnnnnnnnnnnnnnnnnnnnnnnnnnnnnnnnnnnnnnnnnnnnnnnnnnnnnnnnnnnnnnnnnnnnnnnnnnnnnnnnnnnnnnnnnnnnnnnnnnnnnnnnnnnnnnnnnnnnnnnnnnnnnnnnnnnnnnnnnnnnnnnnnnnnnnnnnnnnnnnnnnnnnnnnnnnnnnnnnnnnnnnnnnnnnnnnnnnnnnnnnnnnnnnnnnnnnnnnnnnnnnnnnnnnnnnnnnnnnnnnnnnnnnnnnnnnnnnnnnnnnnnnnnnnnnnnnnnnnnnnnnnnnnnnnnnnnnnnnnnnnnnnnnnnnnnnnnnnnnnnnnnnnnnnnnnnnnnnnnnnnnnnnnnnnnnnnnnnnnnnnnnnnnnnnnnnnnnnnnnnnnnnnnnnnnnnnnnnnnnnnnnnnnnnnnnnnnnnnnnnnnnnnnnnnnnnnnnnnnnnnnnnnnnnnnnnnnnnnnnnnnnnnnnnnnnnnnnnnnnnnnnnnnnnnnnnnnnnnnnnnnnnnnnnnnnnnnnnnnnnnnnnnnnnnnnnnnnnnnnnnnnnnnnnnnnnnnnnnnnnnnnnnnnnnnnnnnnnnnnnnnnnnnnnnnnnnnnnnnnnnnnnnnnnnnnnnnnnnnnnnnnnnnnnnnnnnnnnnnnnnnnnnnnnnnnnnnnnnnnnnnnnnnnnnnnnnnnnnnnnnnnnnnnnnnnnnnnnnnnnnnnnnnnnnnnnnnnnnnnnnnnnnnnnnnnnnnnnnnnnnnnnnnnnnnnnnnnnnnnnnnnnnnnnnnnnnnnnnnnnnnnnnnnnnnnnnnnnnnnnnnnnnnnnnnnnnnnnnnnnnnnnnnnnnnnnnnnnnnnnnnnnnnnnnnnnnnnnnnnnnnnnnnnnnnnnnnnnnnnnnnnnnnnnnnnnnnnnnnnnnnnnnnnnnnnnnnnnnnnnnnnnnnnnnnnnnnnnnnnnnnnnnnnnnnnnnnnnnnnnnnnnnnnnnnnnnnnnnnnnnnnnnnnnnnnnnnnnnnnnnnnnnnnnnnnnnnnnnnnnnnnnnnnnnnnnnnnnnnnnnnnnnnnnnnnnnnnnnnnnnnnnnnnnnnnnnnnnnnnnnnnnnnnnnnnnnnnnnnnnnnnnnnnnnnnnnnnnnnnnnnnnnnnnnnnnnnnnnnnnnnnnnnnnnnnnnnnnnnnnnnnnnnnnnnnnnnnnnnnnnnnnnnnnnnnnnnnnnnnnnnnnnnnnnnnnnnnnnnnnnnnnnnnnnnnnnnnnnnnnnnnnnnnnnnnnnnnnnnnnnnnnnnnnnnnnnnnnnnnnnnnnnnnnnnnnnnnnnnnnnnnnnnnnnnnnnnnnnnnnnnnnnnnnnnnnnnnnnnnnnnnnnnnnnnnnnnnnnnnnnnnnnnnnnnnnnnnnnnnnnnnnnnnnnnnnnnnnnnnnnnnnnnnnnnnnnnnnnnnnnnnnnnnnnnnnnnnnnnnnnnnnnnnnnnnnnnnnnnnnnnnnnnnnnnnnnnnnnnnnnnnnnnnnnnnnnnnnnnnnnnnnnnnnnnnnnnnnnnnnnnnnnnnnnnnnnnnnnnnnnnnnnnnnnnnnnnnnnnnnnnnnnnnnnnnnnnnnnnnnnnnnnnnnnnnnnnnnnnnnnnnnnnnnnnnnnnnnnnnnnnnnnnnnnnnnnnnnnnnnnnnnnnnnnnnnnnnnnnnnnnnnnnnnnnnnnnnnnnnnnnnnnnnnnnnnnnnnnnnnnnnnnnnnnnnnnnnnnnnnnnnnnnnnnnnnnnnnnnnnnnnnnnnnnnnnnnnnnnnnnnnnnnnnnnnnnnnnnnnnnnnnnnnnnnnnnnnnnnnnnnnnnnnnnnnnnnnnnnnnnnnnnnnnnnnnnnnnnnnnnnnnnnnnnnnnnnnnnnnnnnnnnnnnnnnnnnnnnnnnnnnnnnnnnnnnnnnnnnnnnnnnnnnnnnnnnnnnnnnnnnnnnnnnnnnnnnnnnnnnnnnnnnnnnnnnnnnnnnnnnnnnnnnnnnnnnnnnnnnnnnnnnnnnnnnnnnnnnnnnnnnnnnnnnnnnnnnnnnnnnnnnnnnnnnnnnnnnnnnnnnnnnnnnnnnnnnnnnnnnnnnnnnnnnnnnnnnnnnnnnnnnnnnnnnnnnnnnnnnnnnnnnnnnnnnnnnnnnnnnnnnnnnnnnnnnnnnnnnnnnnnnnnnnnnnnnnnnnnnnnnnnnnnnnnnnnnnnnnnnnnnnnnnnnnnnnnnnnnnnnnnnnnnnnnnnnnnnnnnnnnnnnnnnnnnnnnnnnnnnnnnnnnnnnnnnnnnnnnnnnnnnnnnnnnnnnnnnnnnnnnnnnnnnnnnnnnnnnnnnnnnnnnnnnnnnnnnnnnnnnnnnnnnnnnnnnnnnnnnnnnnnnnnnnnnnnnnnnnnnnnnnnnnnnnnnnnnnnnnnnnnnnnnnnnnnnnnnnnnnnnnnnnnnnnnnnnnnnnnnnnnnnnnnnnnnnnnnnnnnnnnnnnnnnnnnnnnnnnnnnnnnnnnnnnnnnnnnnnnnnnnnnnnnnnnnnnnnnnnnnnnnnnnnnnnnnnnnnnnnnnnnnnnnnnnnnnnnnnnnnnnnnnnnnnnnnnnnnnnnnnnnnnnnnnnnnnnnnnnnnnnnnnnnnnnnnnnnnnnnnnnnnnnnnnnnnnnnnnnnnnnnnnnnnnnnnnnnnnnnnnnnnnnnnnnnnnnnnnnnnnnnnnnnnnnnnnnnnnnnnnnnnnnnnnnnnnnnnnnnnnnnnnnnnnnnnnnnnnnnnnnnnnnnnnnnnnnnnnnnnnnnnnnnnnnnnnnnnnnnnnnnnnnnnnnnnnnnnnnnnnnnnnnnnnnnnnnnnnnnnnnnnnnnnnnnnnnnnnnnnnnnnnnnnnnnnnnnnnnnnnnnnnnnnnnnnnnnnnnnnnnnnnnnnnnnnnnnnnnnnnnnnnnnnnnnnnnnnnnnnnnnnnnnnnnnnnnnnnnnnnnnnnnnnnnnnnnnnnnnnnnnnnnnnnnnnnnnnnnnnnnnnnnnnnnnnnnnnnnnnnnnnnnnnnnnnnnnnnnnnnnnnnnnnnnnnnnnnnnnnnnnnnnnnnnnnnnnnnnnnnnnnnnnnnnnnnnnnnnnnnnnnnnnnnnnnnnnnnnnnnnnnnnnnnnnnnnnnnnnnnnnnnnnnnnnnnnnnnnnnnnnnnnnnnnnnnnnnnnnnnnnnnnnnnnnnnnnnnnnnnnnnnnnnnnnnnnnnnnnnnnnnnnnnnnnnnnnnnnnnnnnnnnnnnnnnnnnnnnnnnnnnnnnnnnnnnnnnnnnnnnnnnnnnnnnnnnnnnnnnnnnnnnnnnnnnnnnnnnnnnnnnnnnnnnnnnnnnnnnnnnnnnnnnnnnnnnnnnnnnnnnnnnnnnnnnnnnnnnnnnnnnnnnnnnnnnnnnnnnnnnnnnnnnnnnnnnnnnnnnnnnnnnnnnnnnnnnnnnnnnnnnnnnnnnnnnnnnnnnnnnnnnnnnnnnnnnnnnnnnnnnnnnnnnnnnnnnnnnnnnnnnnnnnnnnnnnnnnnnnnnnnnnnnnnnnnnnnnnnnnnnnnnnnnnnnnnnnnnnnnnnnnnnnnnnnnnnnnnnnnnnnnnnnnnnnnnnnnnnnnnnnnnnnnnnnnnnnnnnnnnnnnnnnnnnnnnnnnnnnnnnnnnnnnnnnnnnnnnnnnnnnnnnnnnnnnnnnnnnnnnnnnnnnnnnnnnnnnnnnnnnnnnnnnnnnnnnnnnnnnnnnnnnnnnnnnnnnnnnnnnnnnnnnnnnnnnnnnnnnnnnnnnnnnnnnnnnnnnnnnnnnnnnnnnnnnnnnnnnnnnnnnnnnnnnnnnnnnnnnnnnnnnnnnnnnnnnnnnnnnnnnnnnnnnnnnnnnnnnnnnnnnnnnnnnnnnnnnnnnnnnnnnnnnnnnnnnnnnnnnnnnnnnnnnnnnnnnnnnnnnnnnnnnnnnnnnnnnnnnnnnnnnnnnnnnnnnnnnnnnnnnnnnnnnnnnnnnnnnnnnnnnnnnnnnnnnnnnnnnnnnnnnnnnnnnnnnnnnnnnnnnnnnnnnnnnnnnnnnnnnnnnnnnnnnnnnnnnnnnnnnnnnnnnnnnnnnnnnnnnnnnnnnnnnnnnnnnnnnnnnnnnnnnnnnnnnnnnnnnnnnnnnnnnnnnnnnnnnnnnnnnnnnnnnnnnnnnnnnnnnnnnnnnnnnnnnnnnnnnnnnnnnnnnnnnnnnnnnnnnnnnnnnnnnnnnnnnnnnnnnnnnnnnnnnnnnnnnnnnnnnnnnnnnnnnnnnnnnnnnnnnnnnnnnnnnnnnnnnnnnnnnnnnnnnnnnnnnnnnnnnnnnnnnnnnnnnnnnnnnnnnnnnnnnnnnnnnnnnnnnnnnnnnnnnnnnnnnnnnnnnnnnnnnnnnnnnnnnnnnnnnnnnnnnnnnnnnnnnnnnnnnnnnnnnnnnnnnnnnnnnnnnnnnnnnnnnnnnnnnnnnnnnnnnnnnnnnnnnnnnnnnnnnnnnnnnnnnnnnnnnnnnnnnnnnnnnnnnnnnnnnnnnnnnnnnnnnnnnnnnnnnnnnnnnnnnnnnnnnnnnnnnnnnnnnnnnnnnnnnnnnnnnnnnnnnnnnnnnnnnnnnnnnnnnnnnnnnnnnnnnnnnnnnnnnnnnnnnnnnnnnnnnnnnnnnnnnnnnnnnnnnnnnnnnnnnnnnnnnnnnnnnnnnnnnnnnnnnnnnnnnnnnnnnnnnnnnnnnnnnnnnnnnnnnnnnnnnnnnnnnnnnnnnnnnnnnnnnnnnnnnnnnnnnnnnnnnnnnnnnnnnnnnnnnnnnnnnnnnnnnnnnnnnnnnnnnnnnnnnnnnnnnnnnnnnnnnnnnnnnnnnnnnnnnnnnnnnnnnnnnnnnnnnnnnnnnnnnnnnnnnnnnnnnnnnnnnnnnnnnnnnnnnnnnnnnnnnnnnnnnnnnnnnnnnnnnnnnnnnnnnnnnnnnnnnnnnnnnnnnnnnnnnnnnnnnnnnnnnnnnnnnnnnnnnnnnnnnnnnnnnnnnnnnnnnnnnnnnnnnnnnnnnnnnnnnnnnnnnnnnnnnnnnnnnnnnnnnnnnnnnnnnnnnnnnnnnnnnnnnnnnnnnnnnnnnnnnnnnnnnnnnnnnnnnnnnnnnnnnnnnnnnnnnnnnnnnnnnnnnnnnnnnnnnnnnnnnnnnnnnnnnnnnnnnnnnnnnnnnnnnnnnnnnnnnnnnnnnnnnnnnnnnnnnnnnnnnnnnnnnnnnnnnnnnnnnnnnnnnnnnnnnnnnnnnnnnnnnnnnnnnnnnnnnnnnnnnnnnnnnnnnnnnnnnnnnnnnnnnnnnnnnnnnnnnnnnnnnnnnnnnnnnnnnnnnnnnnnnnnnnnnnnnnnnnnnnnnnnnnnnnnnnnnnnnnnnnnnnnnnnnnnnnnnnnnnnnnnnnnnnnnnnnnnnnnnnnnnnnnnnnnnnnnnnnnnnnnnnnnnnnnnnnnnnnnnnnnnnnnnnnnnnnnnnnnnnnnnnnnnnnnnnnnnnnnnnnnnnnnnnnnnnnnnnnnnnnnnnnnnnnnnnnnnnnnnnnnnnnnnnnnnnnnnnnnnnnnnnnnnnnnnnnnnnnnnnnnnnnnnnnnnnnnnnnnnnnnnnnnnnnnnnnnnnnnnnnnnnnnnnnnnnnnnnnnnnnnnnnnnnnnnnnnnnnnnnnnnnnnnnnnnnnnnnnnnnnnnnnnnnnnnnnnnnnnnnnnnnnnnnnnnnnnnnnnnnnnnnnnnnnnnnnnnnnnnnnnnnnnnnnnnnnnnnnnnnnnnnnnnnnnnnnnnnnnnnnnnnnnnnnnnnnnnnnnnnnnnnnnnnnnnnnnnnnnnnnnnnnnnnnnnnnnnnnnnnnnnnnnnnnnnnnnnnnnnnnnnnnnnnnnnnnnnnnnnnnnnnnnnnnnnnnnnnnnnnnnnnnnnnnnnnnnnnnnnnnnnnnnnnnnnnnnnnnnnnnnnnnnnnnnnnnnnnnnnnnnnnnnnnnnnnnnnnnnnnnnnnnnnnnnnnnnnnnnnnnnnnnnnnnnnnnnnnnnnnnnnnnnnnnnnnnnnnnnnnnnnnnnnnnnnnnnnnnnnnnnnnnnnnnnnnnnnnnnnnnnnnnnnnnnnnnnnnnnnnnnnnnnnnnnnnnnnnnnnnnnnnnnnnnnnnnnnnnnnnnnnnnnnnnnnnnnnnnnnnnnnnnnnnnnnnnnnnnnnnnnnnnnnnnnnnnnnnnnnnnnnnnnnnnnnnnnnnnnnnnnnnnnnnnnnnnnnnnnnnnnnnnnnnnnnnnnnnnnnnnnnnnnnnnnnnnnnnnnnnnnnnnnnnnnnnnnnnnnnnnnnnnnnnnnnnnnnnnnnnnnnnnnnnnnnnnnnnnnnnnnnnnnnnnnnnnnnnnnnnnnnnnnnnnnnnnnnnnnnnnnnnnnnnnnnnnnnnnnnnnnnnnnnnnnnnnnnnnnnnnnnnnnnnnnnnnnnnnnnnnnnnnnnnnnnnnnnnnnnnnnnnnnnnnnnnnnnnnnnnnnnnnnnnnnnnnnnnnnnnnnnnnnnnnnnnnnnnnnnnnnnnnnnnnnnnnnnnnnnnnnnnnnnnnnnnnnnnnnnnnnnnnnnnnnnnnnnnnnnnnnnnnnnnnnnnnnnnnnnnnnnnnnnnnnnnnnnnnnnnnnnnnnnnnnnnnnnnnnnnnnnnnnnnnnnnnnnnnnnnnnnnnnnnnnnnnnnnnnnnnnnnnnnnnnnnnnnnnnnnnnnnnnnnnnnnnnnnnnnnnnnnnnnnnnnnnnnnnnnnnnnnnnnnnnnnnnnnnnnnnnnnnnnnnnnnnnnnnnnnnnnnnnnnnnnnnnnnnnnnnnnnnnnnnnnnnnnnnnnnnnnnnnnnnnnnnnnnnnnnnnnnnnnnnnnnnnnnnnnnnnnnnnnnnnnnnnnnnnnnnnnnnnnnnnnnnnnnnnnnnnnnnnnnnnnnnnnnnnnnnnnnnnnnnnnnnnnnnnnnnnnnnnnnnnnnnnnnnnnnnnnnnnnnnnnnnnnnnnnnnnnnnnnnnnnnnnnnnnnnnnnnnnnnnnnnnnnnnnnnnnnnnnnnnnnnnnnnnnnnnnnnnnnnnnnnnnnnnnnnnnnnnnnnnnnnnnnnnnnnnnnnnnnnnnnnnnnnnnnnnnnnnnnnnnnnnnnnnnnnnnnnnnnnnnnnnnnnnnnnnnnnnnnnnnnnnnnnnnnnnnnnnnnnnnnnnnnnnnnnnnnnnnnnnnnnnnnnnnnnnnnnnnnnnnnnnnnnnnnnnnnnnnnnnnnnnnnnnnnnnnnnnnnnnnnnnnnnnnnnnnnnnnnnnnnnnnnnnnnnnnnnnnnnnnnnnnnnnnnnnnnnnnnnnnnnnnnnnnnnnnnnnnnnnnnnnnnnnnnnnnnnnnnnnnnnnnnnnnnnnnnnnnnnnnnnnnnnnnnnnnnnnnnnnnnnnnnnnnnnnnnnnnnnnnnnnnnnnnnnnnnnnnnnnnnnnnnnnnnnnnnnnnnnnnnnnnnnnnnnnnnnnnnnnnnnnnnnnnnnnnnnnnnnnnnnnnnnnnnnnnnnnnnnnnnnnnnnnnnnnnnnnnnnnnnnnnnnnnnnnnnnnnnnnnnnnnnnnnnnnnnnnnnnnnnnnnnnnnnnnnnnnnnnnnnnnnnnnnnnnnnnnnnnnnnnnnnnnnnnnnnnnnnnnnnnnnnnnnnnnnnnnnnnnnnnnnnnnnnnnnnnnnnnnnnnnnnnnnnnnnnnnnnnnnnnnnnnnnnnnnnnnnnnnnnnnnnnnnnnnnnnnnnnnnnnnnnnnnnnnnnnnnnnnnnnnnnnnnnnnnnnnnnnnnnnnnnnnnnnnnnnnnnnnnnnnnnnnnnnnnnnnnnnnnnnnnnnnnnnnnnnnnnnnnnnnnnnnnnnnnnnnnnnnnnnnnnnnnnnnnnnnnnnnnnnnnnnnnnnnnnnnnnnnnnnnnnnnnnnnnnnnnnnnnnnnnnnnnnnnnnnnnnnnnnnnnnnnnnnnnnnnnnnnnnnnnnnnnnnnnnnnnnnnnnnnnnnnnnnnnnnnnnnnnnnnnnnnnnnnnnnnnnnnnnnnnnnnnnnnnnnnnnnnnnnnnnnnnnnnnnnnnnnnnnnnnnnnnnnnnnnnnnnnnnnnnnnnnnnnnnnnnnnnnnnnnnnnnnnnnnnnnnnnnnnnnnnnnnnnnnnnnnnnnnnnnnnnnnnnnnnnnnnnnnnnnnnnnnnnnnnnnnnnnnnnnnnnnnnnnnnnnnnnnnnnnnnnnnnnnnnnnnnnnnnnnnnnnnnnnnnnnnnnnnnnnnnnnnnnnnnnnnnnnnnnnnnnnnnnnnnnnnnnnnnnnnnnnnnnnnnnnnnnnnnnnnnnnnnnnnnnnnnnnnnnnnnnnnnnnnnnnnnnnnnnnnnnnnnnnnnnnnnnnnnnnnnnnnnnnnnnnnnnnnnnnnnnnnnnnnnnnnnnnnnnnnnnnnnnnnnnnnnnnnnnnnnnnnnnnnnnnnnnnnnnnnnnnnnnnnnnnnnnnnnnnnnnnnnnnnnnnnnnnnnnnnnnnnnnnnnnnnnnnnnnnnnnnnnnnnnnnnnnnnnnnnnnnnnnnnnnnnnnnnnnnnnnnnnnnnnnnnnnnnnnnnnnnnnnnnnnnnnnnnnnnnnnnnnnnnnnnnnnnnnnnnnnnnnnnnnnnnnnnnnnnnnnnnnnnnnnnnnnnnnnnnnnnnnnnnnnnnnnnnnnnnnnnnnnnnnnnnnnnnnnnnnnnnnnnnnnnnnnnnnnnnnnnnnnnnnnnnnnnnnnnnnnnnnnnnnnnnnnnnnnnnnnnnnnnnnnnnnnnnnnnnnnnnnnnnnnnnnnnnnnnnnnnnnnnnnnnnnnnnnnnnnnnnnnnnnnnnnnnnnnnnnnnnnnnnnnnnnnnnnnnnnnnnnnnnnnnnnnnnnnnnnnnnnnnnnnnnnnnnnnnnnnnnnnnnnnnnnnnnnnnnnnnnnnnnnnnnnnnnnnnnnnnnnnnnnnnnnnnnnnnnnnnnnnnnnnnnnnnnnnnnnnnnnnnnnnnnnnnnnnnnnnnnnnnnnnnnnnnnnnnnnnnnnnnnnnnnnnnnnnnnnnnnnnnnnnnnnnnnnnnnnnnnnnnnnnnnnnnnnnnnnnnnnnnnnnnnnnnnnnnnnnnnnnnnnnnnnnnnnnnnnnnnnnnnnnnnnnnnnnnnnnnnnnnnnnnnnnnnnnnnnnnnnnnnnnnnnnnnnnnnnnnnnnnnnnnnnnnnnnnnnnnnnnnnnnnnnnnnnnnnnnnnnnnnnnnnnnnnnnnnnnnnnnnnnnnnnnnnnnnnnnnnnnnnnnnnnnnnnnnnnnnnnnnnnnnnnnnnnnnnnnnnnnnnnnnnnnnnnnnnnnnnnnnnnnnnnnnnnnnnnnnnnnnnnnnnnnnnnnnnnnnnnnnnnnnnnnnnnnnnnnnnnnnnnnnnnnnnnnnnnnnnnnnnnnnnnnnnnnnnnnnnnnnnnnnnnnnnnnnnnnnnnnnnnnnnnnnnnnnnnnnnnnnnnnnnnnnnnnnnnnnnnnnnnnnnnnnnnnnnnnnnnnnnnnnnnnnnnnnnnnnnnnnnnnnnnnnnnnnnnnnnnnnnnnnnnnnnnnnnnnnnnnnnnnnnnnnnnnnnnnnnnnnnnnnnnnnnnnnnnnnnnnnnnnnnnnnnnnnnnnnnnnnnnnnnnnnnnnnnnnnnnnnnnnnnnnnnnnnnnnnnnnnnnnnnnnnnnnnnnnnnnnnnnnnnnnnnnnnnnnnnnnnnnnnnnnnnnnnnnnnnnnnnnnnnnnnnnnnnnnnnnnnnnnnnnnnnnnnnnnnnnnnnnnnnnnnnnnnnnnnnnnnnnnnnnnnnnnnnnnnnnnnnnnnnnnnnnnnnnnnnnnnnnnnnnnnnnnnnnnnnnnnnnnnnnnnnnnnnnnnnnnnnnnnnnnnnnnnnnnnnnnnnnnnnnnnnnnnnnnnnnnnnnnnnnnnnnnnnnnnnnnnnnnnnnnnnnnnnnnnnnnnnnnnnnnnnnnnnnnnnnnnnnnnnnnnnnnnnnnnnnnnnnnnnnnnnnnnnnnnnnnnnnnnnnnnnnnnnnnnnnnnnnnnnnnnnnnnnnnnnnnnnnnnnnnnnnnnnnnnnnnnnnnnnnnnnnnnnnnnnnnnnnnnnnnnnnnnnnnnnnnnnnnnnnnnnnnnnnnnnnnnnnnnnnnnnnnnnnnnnnnnnnnnnnnnnnnnnnnnnnnnnnnnnnnnnnnnnnnnnnnnnnnnnnnnnnnnnnnnnnnnnnnnnnnnnnnnnnnnnnnnnnnnnnnnnnnnnnnnnnnnnnnnnnnnnnnnnnnnnnnnnnnnnnnnnnnnnnnnnnnnnnnnnnnnnnnnnnnnnnnnnnnnnnnnnnnnnnnnnnnnnnnnnnnnnnnnnnnnnnnnnnnnnnnnnnnnnnnnnnnnnnnnnnnnnnnnnnnnnnnnnnnnnnnnnnnnnnnnnnnnnnnnnnnnnnnnnnnnnnnnnnnnnnnnnnnnnnnnnnnnnnnnnnnnnnnnnnnnnnnnnnnnnnnnnnnnnnnnnnnnnnnnnnnnnnnnnnnnnnnnnnnnnnnnnnnnnnnnnnnnnnnnnnnnnnnnnnnnnnnnnnnnnnnnnnnnnnnnnnnnnnnnnnnnnnnnnnnnnnnnnnnnnnnnnnnnnnnnnnnnnnnnnnnnnnnnnnnnnnnnnnnnnnnnnnnnnnnnnnnnnnnnnnnnnnnnnnnnnnnnnnnnnnnnnnnnnnnnnnnnnnnnnnnnnnnnnnnnnnnnnnnnnnnnnnnnnnnnnnnnnnnnnnnnnnnnnnnnnnnnnnnnnnnnnnnnnnnnnnnnnnnnnnnnnnnnnnnnnnnnnnnnnnnnnnnnnnnnnnnnnnnnnnnnnnnnnnnnnnnnnnnnnnnnnnnnnnnnnnnnnnnnnnnnnnnnnnnnnnnnnnnnnnnnnnnnnnnnnnnnnnnnnnnnnnnnnnnnnnnnnnnnnnnnnnnnnnnnnnnnnnnnnnnnnnnnnnnnnnnnnnnnnnnnnnnnnnnnnnnnnnnnnnnnnnnnnnnnnnnnnnnnnnnnnnnnnnnnnnnnnnnnnnnnnnnnnnnnnnnnnnnnnnnnnnnnnnnnnnnnnnnnnnnnnnnnnnnnnnnnnnnnnnnnnnnnnnnnnnnnnnnnnnnnnnnnnnnnnnnnnnnnnnnnnnnnnnnnnnnnnnnnnnnnnnnnnnnnnnnnnnnnnnnnnnnnnnnnnnnnnnnnnnnnnnnnnnnnnnnnnnnnnnnnnnnnnnnnnnnnnnnnnnnnnnnnnnnnnnnnnnnnnnnnnnnnnnnnnnnnnnnnnnnnnnnnnnnnnnnnnnnnnnnnnnnnnnnnnnnnnnnnnnnnnnnnnnnnnnnnnnnnnnnnnnnnnnnnnnnnnnnnnnnnnnnnnnnnnnnnnnnnnnnnnnnnnnnnnnnnnnnnnnnnnnnnnnnnnnnnnnnnnnnnnnnnnnnnnnnnnnnnnnnnnnnnnnnnnnnnnnnnnnnnnnnnnnnnnnnnnnnnnnnnnnnnnnnnnnnnnnnnnnnnnnnnnnnnnnnnnnnnnnnnnnnnnnnnnnnnnnnnnnnnnnnnnnnnnnnnnnnnnnnnnnnnnnnnnnnnnnnnnnnnnnnnnnnnnnnnnnnnnnnnnnnnnnnnnnnnnnnnnnnnnnnnnnnnnnnnnnnnnnnnnnnnnnnnnnnnnnnnnnnnnnnnnnnnnnnnnnnnnnnnnnnnnnnnnnnnnnnnnnnnnnnnnnnnnnnnnnnnnnnnnnnnnnnnnnnnnnnnnnnnnnnnnnnnnnnnnnnnnnnnnnnnnnnnnnnnnnnnnnnnnnnnnnnnnnnnnnnnnnnnnnnnnnnnnnnnnnnnnnnnnnnnnnnnnnnnnnnnnnnnnnnnnnnnnnnnnnnnnnnnnnnnnnnnnnnnnnnnnnnnnnnnnnnnnnnnnnnnnnnnnnnnnnnnnnnnnnnnnnnnnnnnnnnnnnnnnnnnnnnnnnnnnnnnnnnnnnnnnnnnnnnnnnnnnnnnnnnnnnnnnnnnnnnnnnnnnnnnnnnnnnnnnnnnnnnnnnnnnnnnnnnnnnnnnnnnnnnnnnnnnnnnnnnnnnnnnnnnnnnnnnnnnnnnnnnnnnnnnnnnnnnnnnnnnnnnnnnnnnnnnnnnnnnnnnnnnnnnnnnnnnnnnnnnnnnnnnnnnnnnnnnnnnnnnnnnnnnnnnnnnnnnnnnnnnnnnnnnnnnnnnnnnnnnnnnnnnnnnnnnnnnnnnnnnnnnnnnnnnnnnnnnnnnnnnnnnnnnnnnnnnnnnnnnnnnnnnnnnnnnnnnnnnnnnnnnnnnnnnnnnnnnnnnnnnnnnnnnnnnnnnnnnnnnnnnnnnnnnnnnnnnnnnnnnnnnnnnnnnnnnnnnnnnnnnnnnnnnnnnnnnnnnnnnnnnnnnnnnnnnnnnnnnnnnnnnnnnnnnnnnnnnnnnnnnnnnnnnnnnnnnnnnnnnnnnnnnnnnnnnnnnnnnnnnnnnnnnnnnnnnnnnnnnnnnnnnnnnnnnnnnnnnnnnnnnnnnnnnnnnnnnnnnnnnnnnnnnnnnnnnnnnnnnnnnnnnnnnnnnnnnnnnnnnnnnnnnnnnnnnnnnnnnnnnnnnnnnnnnnnnnnnnnnnnnnnnnnnnnnnnnnnnnnnnnnnnnnnnnnnnnnnnnnnnnnnnnnnnnnnnnnnnnnnnnnnnnnnnnnnnnnnnnnnnnnnnnnnnnnnnnnnnnnnnnnnnnnnnnnnnnnnnnnnnnnnnnnnnnnnnnnnnnnnnnnnnnnnnnnnnnnnnnnnnnnnnnnnnnnnnnnnnnnnnnnnnnnnnnnnnnnnnnnnnnnnnnnnnnnnnnnnnnnnnnnnnnnnnnnnnnnnnnnnnnnnnnnnnnnnnnnnnnnnnnnnnnnnnnnnnnnnnnnnnnnnnnnnnnnnnnnnnnnnnnnnnnnnnnnnnnnnnnnnnnnnnnnnnnnnnnnnnnnnnnnnnnnnnnnnnnnnnnnnnnnnnnnnnnnnnnnnnnnnnnnnnnnnnnnnnnnnnnnnnnnnnnnnnnnnnnnnnnnnnnnnnnnnnnnnnnnnnnnnnnnnnnnnnnnnnnnnnnnnnnnnnnnnnnnnnnnnnnnnnnnnnnnnnnnnnnnnnnnnnnnnnnnnnnnnnnnnnnnnnnnnnnnnnnnnnnnnnnnnnnnnnnnnnnnnnnnnnnnnnnnnnnnnnnnnnnnnnnnnnnnnnnnnnnnnnnnnnnnnnnnnnnnnnnnnnnnnnnnnnnnnnnnnnnnnnnnnnnnnnnnnnnnnnnnnnnnnnnnnnnnnnnnnnnnnnnnnnnnnnnnnnnnnnnnnnnnnnnnnnnnnnnnnnnnnnnnnnnnnnnnnnnnnnnnnnnnnnnnnnnnnnnnnnnnnnnnnnnnnnnnnnnnnnnnnnnnnnnnnnnnnnnnnnnnnnnnnnnnnnnnnnnnnnnnnnnnnnnnnnnnnnnnnnnnnnnnnnnnnnnnnnnnnnnnnnnnnnnnnnnnnnnnnnnnnnnnnnnnnnnnnnnnnnnnnnnnnnnnnnnnnnnnnnnnnnnnnnnnnnnnnnnnnnnnnnnnnnnnnnnnnnnnnnnnnnnnnnnnnnnnnnnnnnnnnnnnnnnnnnnnnnnnnnnnnnnnnnnnnnnnnnnnnnnnnnnnnnnnnnnnnnnnnnnnnnnnnnnnnnnnnnnnnnnnnnnnnnnnnnnnnnnnnnnnnnnnnnnnnnnnnnnnnnnnnnnnnnnnnnnnnnnnnnnnnnnnnnnnnnnnnnnnnnnnnnnnnnnnnnnnnnnnnnnnnnnnnnnnnnnnnnnnnnnnnnnnnnnnnnnnnnnnnnnnnnnnnnnnnnnnnnnnnnnnnnnnnnnnnnnnnnnnnnnnnnnnnnnnnnnnnnnnnnnnnnnnnnnnnnnnnnnnnnnnnnnnnnnnnnnnnnnnnnnnnnnnnnnnnnnnnnnnnnnnnnnnnnnnnnnnnnnnnnnnnnnnnnnnnnnnnnnnnnnnnnnnnnnnnnnnnnnnnnnnnnnnnnnnnnnnnnnnnnnnnnnnnnnnnnnnnnnnnnnnnnnnnnnnnnnnnnnnnnnnnnnnnnnnnnnnnnnnnnnnnnnnnnnnnnnnnnnnnnnnnnnnnnnnnnnnnnnnnnnnnnnnnnnnnnnnnnnnnnnnnnnnnnnnnnnnnnnnnnnnnnnnnnnnnnnnnnnnnnnnnnnnnnnnnnnnnnnnnnnnnnnnnnnnnnnnnnnnnnnnnnnnnnnnnnnnnnnnnnnnnnnnnnnnnnnnnnnnnnnnnnnnnnnnnnnnnnnnnnnnnnnnnnnnnnnnnnnnnnnnnnnnnnnnnnnnnnnnnnnnnnnnnnnnnnnnnnnnnnnnnnnnnnnnnnnnnnnnnnnnnnnnnnnnnnnnnnnnnnnnnnnnnnnnnnnnnnnnnnnnnnnnnnnnnnnnnnnnnnnnnnnnnnnnnnnnnnnnnnnnnnnnnnnnnnnnnnnnnnnnnnnnnnnnnnnnnnnnnnnnnnnnnnnnnnnnnnnnnnnnnnnnnnnnnnnnnnnnnnnnnnnnnnnnnnnnnnnnnnnnnnnnnnnnnnnnnnnnnnnnnnnnnnnnnnnnnnnnnnnnnnnnnnnnnnnnnnnnnnnnnnnnnnnnnnnnnnnnnnnnnnnnnnnnnnnnnnnnnnnnnnnnnnnnnnnnnnnnnnnnnnnnnnnnnnnnnnnnnnnnnnnnnnnnnnnnnnnnnnnnnnnnnnnnnnnnnnnnnnnnnnnnnnnnnnnnnnnnnnnnnnnnnnnnnnnnnnnnnnnnnnnnnnnnnnnnnnnnnnnnnnnnnnnnnnnnnnnnnnnnnnnnnnnnnnnnnnnnnnnnnnnnnnnnnnnnnnnnnnnnnnnnnnnnnnnnnnnnnnnnnnnnnnnnnnnnnnnnnnnnnnnnnnnnnnnnnnnnnnnnnnnnnnnnnnnnnnnnnnnnnnnnnnnnnnnnnnnnnnnnnnnnnnnnnnnnnnnnnnnnnnnnnnnnnnnnnnnnnnnnnnnnnnnnnnnnnnnnnnnnnnnnnnnnnnnnnnnnnnnnnnnnnnnnnnnnnnnnnnnnnnnnnnnnnnnnnnnnnnnnnnnnnnnnnnnnnnnnnnnnnnnnnnnnnnnnnnnnnnnnnnnnnnnnnnnnnnnnnnnnnnnnnnnnnnnnnnnnnnnnnnnnnnnnnnnnnnnnnnnnnnnnnnnnnnnnnnnnnnnnnnnnnnnnnnnnnnnnnnnnnnnnnnnnnnnnnnnnnnnnnnnnnnnnnnnnnnnnnnnnnnnnnnnnnnnnnnnnnnnnnnnnnnnnnnnnnnnnnnnnnnnnnnnnnnnnnnnnnnnnnnnnnnnnnnnnnnnnnnnnnnnnnnnnnnnnnnnnnnnnnnnnnnnnnnnnnnnnnnnnnnnnnnnnnnnnnnnnnnnnnnnnnnnnnnnnnnnnnnnnnnnnnnnnnnnnnnnnnnnnnnnnnnnnnnnnnnnnnnnnnnnnnnnnnnnnnnnnnnnnnnnnnnnnnnnnnnnnnnnnnnnnnnnnnnnnnnnnnnnnnnnnnnnnnnnnnnnnnnnnnnnnnnnnnnnnnnnnnnnnnnnnnnnnnnnnnnnnnnnnnnnnnnnnnnnnnnnnnnnnnnnnnnnnnnnnnnnnnnnnnnnnnnnnnnnnnnnnnnnnnnnnnnnnnnnnnnnnnnnnnnnnnnnnnnnnnnnnnnnnnnnnnnnnnnnnnnnnnnnnnnnnnnnnnnnnnnnnnnnnnnnnnnnnnnnnnnnnnnnnnnnnnnnnnnnnnnnnnnnnnnnnnnnnnnnnnnnnnnnnnnnnnnnnnnnnnnnnnnnnnnnnnnnnnnnnnnnnnnnnnnnnnnnnnnnnnnnnnnnnnnnnnnnnnnnnnnnnnnnnnnnnnnnnnnnnnnnnnnnnnnnnnnnnnnnnnnnnnnnnnnnnnnnnnnnnnnnnnnnnnnnnnnnnnnnnnnnnnnnnnnnnnnnnnnnnnnnnnnnnnnnnnnnnnnnnnnnnnnnnnnnnnnnnnnnnnnnnnnnnnnnnnnnnnnnnnnnnnnnnnnnnnnnnnnnnnnnnnnnnnnnnnnnnnnnnnnnnnnnnnnnnnnnnnnnnnnnnnnnnnnnnnnnnnnnnnnnnnnnnntccccgccggaagtgcggtcagaggctaatatatcatagctgtatagctaagacaagaaaatttcttaatttttcgattttcttgattttttcacagcttctttttgtcgggatgtatgcgccacagggacgatatattgttggggtgggttctacgacatgaacatctggagccccaagaagcgagacgagaaattgaatcacaggcgcgacaatcccgtcaaacgagtgctggtcaagcacccgggcgactggccgtggtcgcgctgcggcgggaggttctatttctggaatgatggttcgatcttgagcatggacaagaggctatgaaggtgtcgacatgccgaggggcgcatacatcccgacaaaaacccgtcgggacgtatgcgccacccgcgaaatcgatcgcaagattccctccgaatcggaacgccgcggaggcatcaaagcttctgcgcttagtcaacggcgcgccttgcagcctgtgaagtgtgggctaagcggacgcgataaccgttgtcgtggtcttcgggccttgcctttgccgcgtcccgggtgtataccttcgccatgattgtcctgtggtagctacgcagcggacggtccggtccccccggggcgcgacgggcctgccacccgcctcttgcccaggcaaggaggaagccgtggagtacaacctgctcgaagaaaagtggattcccgttctgtggaaagatgggcacagcggtcgcgtgggcattagtgaggcccttaggcaagcaggccggattcgccaaatcgcggccagcaacccaatggaccgcctggccatcctgcgtttcctgcttgcgttgctctattggtgcaaagggaatcccccggacgacaagaactcgatttcttcgtttccctctgattggttcaagaaactcgatgacaacaaagactgtttcaaccttcagggcgatgggaagcggttttaccaacgcaagcctaaccgacttgagaagaagctgtccgtcaactatctgatgcaagaagtgccgaccggcacaaacttctggcacttccggcatgggacagatttcagaaacggcttatgtccggcatgctgcgcaatgggcttgttgcgccttccgctctttgctacgtcggccgggcgcggcaagcccccgggcgtcaatcaaaaaccgccgatctacatcgtgccgatgggcgactgcctttccgaaaccctgcgcctctcatggcggaagacgtcggagatgaacctgggcacgcccacatgggaaaatccggacataagcctccctcaacacggcaatgttccattattgataggattaacgtgggtaccgcggcgcgtctggttagacactccggagacaccagagtccaactgcatcgcctgcgggcgcagggaggctctgatacgtcaatgtgtctttgcgggtattgggagcacaaagacaggcgaaggcagtctggcacgaatctggaacgacccgcacaccatcagcgaaggcgacgagattgtgaagcctttcagcgcgcttggcccggccgacgctgcggctgggaagtggacgaaggtcgtggcgggaatcctgtgcggggaaaagccgaaggggaacagtaagttgtgggtcgtcagctttgcgacagtgcagaacgacaaatacctggaagcagccgagcgggagattcaattcttggccgcgctcgacgacgtgaaggttcaggcgagtttgcaagaaatccaggcgtggcagaaggaaggctggaagctcgttggcagagccaaaccgcgagagacttcacgaaacagaggacaccttgaaattctctccgcagtcgccgctgttcgtccccaagccgaggcaacggtttccggaaaaatcgacgagatgatcgcagaaggcggtaaggcatgggaagaggcggcccaggaatatcgtccgttgatggccgccgtcgccaaatcgctttccccgggctacacaaccgcttccctccggaggcgacaagaaattgccgctgtaaagccggacatgcggccaaagagaaacaacaaagacgaagggggggacaagtgactccaacggagcagtacgtcgaagttctgactcgactgaaacccggtgagctcgggctcttgcgcaaccatgccgggcaagggctcgacgaatcggtagagggctttgaccttttcgcaggcctttggtggccgctgcgggcgcaaacccaacgggcgcctcgccgtgaggtggcctggcttgtcgccaaactctacgccctccggcccctcgagcattcaccccgcgagaccctcgctcgccagctcgggcgatcccggccgggcgagaaaacagcgcggcagcgtttcgagcaacgcttcgacaggatgctcacgctgccgcttgctgaaatcgaacccgccctacagtgggcaatcgacctcatagcttccaagcacctcgaactcgactgggtgcggctgacgaacgatctttccatctgggaacgcgaatccacccggctcaaatgggccgaggaatttttgaactgtccaagaggaggagagtcatgttgatccagattcacgccattcagaatcacagcccggccaacctgaaccgggatgacctgggcgcgcccaagacttgcttttttggcggagtcttgcgctcccgtatttccagccagtgccttaagcgcagcatccgcatgagtgaggagttcagacaattgctgggcggagttcgcacccgccagttggcgaaagagattgcggaaaaggtgacgggcaaagacgtcaggaagcgagcggagaacattctcaaagcctgcgggctggagcctaagaaagcaaaaaaacaggaaggagaagacgaacaggaaagtgctgagaggagcaagatgctggtttacaccacccaagaggcgattacacgcatggccgaactcctccagcagggcgacggaaaaacggacgaggccttggcagcggagttcggcaagctcatcagtgaatccgtcgccgtgccggacatggcgctgagcggcaggatgcttgaaacgggagtcctcaaagacacgacggttgaggcatcgcttcaagtcgcccatgccatttccacccatgaggcccggcccgaggtggactactatgtcgccgccgatgatgtccccggcgaggacgcgggcgcaggttacgtggatgaagccatgttcggttcggcatgtttctacaagtatttctccattcattgggaaacgctggtcaaaaacctgaagcccttcgggacgaatcacgaaaaactggcggcccataccgtcggcgccttcattcgcgccgcggccttggccaaccccacgggaaaacaaaatagttttgccgcgcacaaccctcctgacgggatgttggtggaagtcagaaacactcccatcagctacgccaacgccttcgccaaaccggcggctcctcagggcgaacgggacatcatctcgcagagcgtggcgcagcttgcccattatgtgaacgacatagatacgggatacggcaagccgacgaagcggttctggttctctccaaatctccgctatccgttgacggctaccaccacggagagcgaagacggaaaacagaaacagcgtgaggtcccgcttgccgacaaagatgttaagtctcttgacgaactgatagcggctgtactcaaggaaatcggttacgactggcaggaggccaagaaagtggtcctgaatccggaggtgccccatgagcgcaaagacgctgctacttcggcttgaaggtcctcttcaggcatggggcgatcagcaatccaagttcgtcattcggcgcacggccgaggcgccgaccaagtccggcgtcatcgggatgctttgcgcggcattgggcgtttcccggccagaggcccgcgaaggctggcttccaaggctggcccggctgcgcatgggcgtacgcgtcgatgcgccaggggtccgctggtgggattatcacacggtgggtgcggggatgccgatgcgtaccgccgaggggggaaccaagtccggagccatgctcacccgccgcgaatacctttgcgacgcctcgtttctcgtcgctcttcagggcgaaccggacctcattgaggaactggaggcggcaatcaaagcgcccaagtggacactctacctcggcagaaagtgctgccccccttgccgccctctgctggagcatccgggaggtgaattccccgacttgctttctgccctcgaatcggtcccctggcgtcggcggctgaaggacgatccccagccgcgacccgtcgattgcctgcttgattgggaacccaccaacgagcagcccgaggcgcccgatgatgcgctcgtctggtacgacgtgccgttgacattcgagccgccgtcgcaccaaccccgattcgtcatccgcaggcagttgcgcgtcggagcggacggcgacgtaacacttgcggtgcagccaccgcagagcgacacgccaccgcctccgcgcccaagagcggattacacgaacacagagtacaaaaaccgacgcaaggagcggctcgacgacgactatcacttgtgcgttttttgcaagtctcccgccagcaccgtgcagcacatcacgtaccgccgcgcgggcggcggcgaactccgggacgatttgcgctccctctgccgcctctgccacgacgccgtgaccatgatcgagtacgggctcggaatgggcttggaccgcatcaaccccgaagagccccgttggcgcgacaagatcatcgagaagcgggaagagattatcaggttccgctctctggagactcgccgcagacgccttgccgctgaggaggtggaatagccatgtacctctcctgcctcttgattgacgtcggcaccaaccccgaccgccccaggcccgggcggctctggctgcgaaacctccatcacgtccaccagcgcctttgcatggcgtttccatccaaagaccgaatatcccacgatccccacttcctcaagcctttcaaacccgcggactttgccaacaaccaggtccatgtaagacgtgacggcgactccggctttctcttccgcatcgacccgcaaccgggcgggcgggtcgtgatcctcgtccagtctaactctgccgtaaagcctgactggggctacgccttccacaacgcccgttttcttctgaatcctctagccgctccccctcaggtgcaggaattcgacccccgctttgagaagggtcagcggcttcgcttccgtatccgcgccaatctgagtaagaagataaaaaccagcacagagggcgttgatcttacgaggacgcgagaggggacagataagcggggccgcccgaaggcccaaggcaaacgcgtggcgctgacctgggacaaggaccagaaccgcgacgatgtgatacgaaaatggttcgccggcaagggcggccaaggtggattccaagtggaaactttccgggtcttgcagatcgggtggggcgcaggagaccgatccgacccgaggccgacgggcggccgcatgaaatttcgctcggcgttattggaggggacgcttacggttgaggacgcggacagcttcagagaaaccatcgtgggcggcgttgggcacggcaaagccttcggcttcggcctgctttccgtggcgccgctctcgctgtagcggcggtctccgaccgccggtacgtcgatcggagatcgacgctacaatcccttgtcgatcggggatccgtgcaacatttcttgagcggagatcgagccaatatgaaattcaaaccccgcttgcggcgactggactggctctatacgggcagcccaatctactatctcacgctgtgtacgcaggaccgcaaacgctcgttggcaaatcctgcgattcaccgggaattcacgagattctccgaacgggcgagcgattttcttgtttgggtcgggttcttcatgatcatgcctgatcacatccatcttttcgccggcttttgtcgtgagtccccacctttagggaaatggatcaaggcgctgcgcggggatttatccaaagtcctccgggaagatgagggcgagggcacacattgggagaaagactttttcgatcacgtcctgagatcgcaagaatcctatcgggagaaatatgaatatgtccggcagaatccggtccgggccggtttagtcaagcgcccggaagattggccgtaccagggtgagatccatcgcctggttttgtagcggcggtctccgaccgccgtaacgtcgatcggagatcgactacaaccccggtcgatcggagatcgacgctacaaccgccgtcgatcggagatcgacgctacagcacgggctggaggctctgtgagaattcaagatctccacgttctacccaagttcagtgacgggtggagttatctgtacgtcgagcattgccacgtcgatcaggaagagcgggccattgccgtccacgatcaagccgggaaggtgccggtcccctgtgccaatctggctctcctgatgttgggtccgggcgtctcgattactcacgccgccatctccgtgttggcggaccatgggtgcctggtggcttggtgcggggaggagggagtccgcttctacgccgtgggcatgggcgagacgcgcaacgcggccaacttcctgcatcaggcgaggctgtgggcggaccagggtttccatatgcaggtggtgcgccgcctctatcagttgcgattttcggagaagttcgaccctgccctgaccctccagcaaatccgcggcatggagggcgtgcgggtgcgcgatgcctacgccaaggccgcccaggaagccggcatcacgtggtcgggccgcagctataaacgcgatgagtggagcaaggcggaccctgccaaccgagccttgtccgccgctaactcctgcctatatggaatctgccatgctgccatcgtgtcagcaggtttttcgcccgcactcgggtttatccacaccggcaagatgctgtccttcgtctacgatctcgccgacctgtacaaggctgaaattaccgttccagtggcatttcgcgccgccgccgaggggacgggacagttggaacgccgggtgcgcatcacctgccgcgatcagttcgtatccacgcggcttctggagagaatcatcccggatgtccaaagggcgttgatgctggcaaaagcgacggcctgggacactaccttcgacctggatgccgccgcccccggcttcctctgggacaatctggaaggagaggtcgaaggcggccgcctgctagcccccgaaatcggtgaaacggagcccggcgatggtggtcctgattcttgagcgcgtccccccagggttgcgaggcgagctgactcgctggtttttggaacctcaggcgggagtgttcgtgggacgcgtctccgccatggtccgtgatcggctctgggaaaaagcctgcagccaggccaagggaggcgggtgcttgattatctattcaagcgacaatgaacagggctttcgagtccgaacctggggccaaacagctcgggtcatcgatgacttcgagggcctttttctcgttcgcatgccgcagaatcaataatttagtaagtgttgtccccacgcgcgtgggggtgaaccgccggggctgaaggtttcatgggctggaaagaagttgtccccacgcgcgtgggggtgaaccgatatgctgcatgtgccggggctggcgcttgatgttgtccccacgcgcgtgggggtgaaccggtatcggcgagtggcaaggcgaatccacttaggttgtccccacgcgcgtgggggtgaaccgacctccgagggcgcggggcgcgtgctggcgatgttgtccccacgcgcgtgggggtgaaccggctggggccgacgcgcgcttgtgagactgcgggttgtccccacgcgcgtgggggtgaaccgcgggagaactttgaaggcacggtcctcgatcacgttgtccccacgcgcgtgggggtgaaccggcgcaggttaaggctgaggccaaggccgatgcgttgtccccacgcgcgtgggggtgaaccgtaatggtggcttgcaccttctgctcgaccgatgttgtccccacgcgcgtgggggtgaaccgcagcgggccgtgttggaggagaaggtcgcggagttgtccccacgcgcgtgggggtgaaccgttcccagccgcaggcaggatcaccgtaccccagttgtccccacgcgcgtgggggtgaaccgcaaaacaatatcaagaccaagcacttggatgtgttgtccccacgcgcgtgggggtgaaccgcatcgggcagcacagcggccttataccccaaagttgtccccacgcgcgtgggggtgaaccggcagctcgcggcgattcgcattgccgctgaaagttgtccccacgcgcgtgggggtgaaccggggagtcgtgagtgtagttacaggcagggttcgttgtccccacgcgcgtgggggtgaaccgcttctgcatcttataaagaacgccagtttgaagttgtccccacgcgcgtgggggtgaaccggtacggttcccaggggaattatttcttggggtgttgtccccacgcgcgtgggggtgaaccgatgtagcttgatatgggtgtggtgtcgcagaagttgtccccacgcgcgtgggggtgaaccggcggcgcgcacattccaacctcgtccgtatccgttgtccccacgcgcgtgggggtgaaccggcggacacggcggatgtgacgaatatggagtcgttgtccccacgcgcgtgggggtgaaccggtctctcgaaaaggaaagccaactttcagcttgttgtccccacgcgcgtgggggtgaaccgctcttggcatagagcttagtgagtttgatgaagttgtccccacgcgcgtgggggtgaaccgcctttgccctccgagacgcaacagctccattcgttgtccccacgcgcgtgggggtgaaccggcgagcgcaggtctaagcgaccgcgacaaagagttgtccccacgcgcgtgggggtgaaccggtgatggacacttcctaaaatggcattaagtcgttgtccccacgcgcgtgggggtgaaccgcagcgggtagcgcagacttcgtgcatatcgaagtctgcggcttttgccgccgtgaatcttgaaaagccgcagacctgcaaaaagcgcaggtctgcgctacccactgcctggccatcctggagaattgaaagtccctccagtaaagcggcgaagcgcaggatttccggctgcttcaatcgcttgcgacgctcaccggtcagtagcgcgttggtaatttcgagcccccatacggctggaacaacgagcgtctgcccttcagtgccaccaggaccccgtccgcgtattcgctcgcttcatccggggagcaccaggcaagcgccaccgacgcatgcaccacaacgccgctcaaaatcgccgtccctcaattatcatttcgcggacgctcatggtgtggggctttacgcgcttgcgcaacgcgcgcatgccctcgacaatctcctcgtgcgtcagctttcgatccgagtctcgaaccggcaccagcattgccgccggaacgccgtgtcttgtaatcgtgatcctttcgcaacccatcttgtccagctaaagctccgcatcagctatagtctccctctggccgtgcggcccgccccttgcggcgcaaccaaaccgaagctcaaaacgcgacatcgtcctcgtagcgcgaccggacactgaaggtaaaggttcgccacccgtctcccctgcaaaaccgggtcgcggagtactattgctttgcacagcgggggacgaccgaggcgctacggaagaggttggttcgcgaaactgagcaagagacccctcacccgtcccgctccggctggtggaagcgccggagcgggacacgctcagccccaagggagagggctatggattcagttctacgcgcggtgtccagtcaaagatgtgggacacgctcagccccaagggagagggctatggattcagttctacgcgcggtg

SEQ ID NO: 1039 - DNA, 106286 bp, Artificial Sequence; identical to SEQ ID NO: 1038
  Synthetic Oligonucleotide
  misc_feature (1)..(96242): n is a, c, g, or t

SEQ ID NO: 1040 - DNA, 106286 bp, Artificial Sequence; identical to SEQ ID NO: 1038
  Synthetic Oligonucleotide
  misc_feature (1)..(96242): n is a, c, g, or t

SEQ ID NO: 1041 - DNA, 106286 bp, Artificial Sequence; identical to SEQ ID NO: 1038
  Synthetic Oligonucleotide
  misc_feature (1)..(96242): n is a, c, g, or t

SEQ ID NO: 1042 - DNA, 106286 bp, Artificial Sequence; identical to SEQ ID NO: 1038
  Synthetic Oligonucleotide
  misc_feature (1)..(96242): n is a, c, g, or t

SEQ ID NO: 1043 - DNA, 106286 bp, Artificial Sequence; identical to SEQ ID NO: 1038
  Synthetic Oligonucleotide
  misc_feature (1)..(96242): n is a, c, g, or t

SEQ ID NO: 1044 - DNA, 106286 bp, Artificial Sequence; identical to SEQ ID NO: 1038
  Synthetic Oligonucleotide
  misc_feature (1)..(96242): n is a, c, g, or t

SEQ ID NO: 1045 - DNA, 106286 bp, Artificial Sequence; identical to SEQ ID NO: 1038
  Synthetic Oligonucleotide
  misc_feature (1)..(96242): n is a, c, g, or t

SEQ ID NO: 1046 - DNA, 106286 bp, Artificial Sequence
  Synthetic Oligonucleotide
  misc_feature (1)..(96242): n is a, c, g, or t
nnnnnnnnnnnnnnnnnnnnnnnnnnnnnnnnnnnnnnnnnnnnnnnnnnnnnnnnnnnnnnnnnnnnnnnnnnnnnnnnnnnnnnnnnnnnnnnnnnnnnnnnnnnnnnnnnnnnnnnnnnnnnnnnnnnnnnnnnnnnnnnnnnnnnnnnnnnnnnnnnnnnnnnnnnnnnnnnnnnnnnnnnnnnnnnnnnnnnnnnnnnnnnnnnnnnnnnnnnnnnnnnnnnnnnnnnnnnnnnnnnnnnnnnnnnnnnnnnnnnnnnnnnnnnnnnnnnnnnnnnnnnnnnnnnnnnnnnnnnnnnnnnnnnnnnnnnnnnnnnnnnnnnnnnnnnnnnnnnnnnnnnnnnnnnnnnnnnnnnnnnnnnnnnnnnnnnnnnnnnnnnnnnnnnnnnnnnnnnnnnnnnnnnnnnnnnnnnnnnnnnnnnnnnnnnnnnnnnnnnnnnnnnnnnnnnnnnnnnnnnnnnnnnnnnnnnnnnnnnnnnnnnnnnnnnnnnnnnnnnnnnnnnnnnnnnnnnnnnnnnnnnnnnnnnnnnnnnnnnnnnnnnnnnnnnnnnnnnnnnnnnnnnnnnnnnnnnnnnnnnnnnnnnnnnnnnnnnnnnnnnnnnnnnnnnnnnnnnnnnnnnnnnnnnnnnnnnnnnnnnnnnnnnnnnnnnnnnnnnnnnnnnnnnnnnnnnnnnnnnnnnnnnnnnnnnnnnnnnnnnnnnnnnnnnnnnnnnnnnnnnnnnnnnnnnnnnnnnnnnnnnnnnnnnnnnnnnnnnnnnnnnnnnnnnnnnnnnnnnnnnnnnnnnnnnnnnnnnnnnnnnnnnnnnnnnnnnnnnnnnnnnnnnnnnnnnnnnnnnnnnnnnnnnnnnnnnnnnnnnnnnnnnnnnnnnnnnnnnnnnnnnnnnnnnnnnnnnnnnnnnnnnnnnnnnnnnnnnnnnnnnnnnnnnnnnnnnnnnnnnnnnnnnnnnnnnnnnnnnnnnnnnnnnnnnnnnnnnnnnnnnnnnnnnnnnnnnnnnnnnnnnnnnnnnnnnnnnnnnnnnnnnnnnnnnnnnnnnnnnnnnnnnnnnnnnnnnnnnnnnnnnnnnnnnnnnnnnnnnnnnnnnnnnnnnnnnnnnnnnnnnnnnnnnnnnnnnnnnnnnnnnnnnnnnnnnnnnnnnnnnnnnnnnnnnnnnnnnnnnnnnnnnnnnnnnnnnnnnnnnnnnnnnnnnnnnnnnnnnnnnnnnnnnnnnnnnnnnnnnnnnnnnnnnnnnnnnnnnnnnnnnnnnnnnnnnnnnnnnnnnnnnnnnnnnnnnnnnnnnnnnnnnnnnnnnnnnnnnnnnnnnnnnnnnnnnnnnnnnnnnnnnnnnnnnnnnnnnnnnnnnnnnnnnnnnnnnnnnnnnnnnnnnnnnnnnnnnnnnnnnnnnnnnnnnnnnnnnnnnnnnnnnnnnnnnnnnnnnnnnnnnnnnnnnnnnnnnnnnnnnnnnnnnnnnnnnnnnnnnnnnnnnnnnnnnnnnnnnnnnnnnnnnnnnnnnnnnnnnnnnnnnnnnnnnnnnnnnnnnnnnnnnnnnnnnnnnnnnnnnnnnnnnnnnnnnnnnnnnnnnnnnnnnnnnnnnnnnnnnnnnnnnnnnnnnnnnnnnnnnnnnnnnnnnnnnnnnnnnnnnnnnnnnnnnnnnnnnnnnnnnnnnnnnnnnnnnnnnnnnnnnnnnnnnnnnnnnnnnnnnnnnnnnnnnnnnnnnnnnnnnnnnnnnnnnnnnnnnnnnnnnnnnnnnnnnnnnnnnnnnnnnnnnnnnnnnnnnnnnnnnnnnnnnnnnnnnnnnnnnnnnnnnnnnnnnnnnnnnnnnnnnnnnnnnnnnnnnnnnnnnnnnnnnnnnnnnnnnnnnnnnnnnnnnnnnnnnnnnnnnnnnnnnnnnnnnnnnnnnnnnnnnnnnnnnnnnnnnnnnnnnnnnnnnnnnnnnnnnnnnnnnnnnnnnnnnnnnnnnnnnnnnnnnnnnnnnnnnnnnnnnnnnnnnnnnnnnnnnnnnnnnnnnnnnnnnnnnnnnnnnnnnnnnnnnnnnnnnnnnnnnnnnnnnnnnnnnnnnnnnnnnnnnnnnnnnnnnnnnnnnnnnnnnnnnnnnnnnnnnnnnnnnnnnnnnnnnnnnnnnnnnnnnnnnnnnnnnnnnnnnnnnnnnnnnnnnnnnnnnnnnnnnnnnnnnnnnnnnnnnnnnnnnnnnnnnnnnnnnnnnnnnnnnnnnnnnnnnnnnnnnnnnnnnnnnnnnnnnnnnnnnnnnnnnnnnnnnnnnnnnnnnnnnnnnnnnnnnnnnnnnnnnnnnnnnnnnnnnnnnnnnnnnnnnnnnnnnnnnnnnnnnnnnnnnnnnnnnnnnnnnnnnnnnnnnnnnnnnnnnnnnnnnnnnnnnnnnnnnnnnnnnnnnnnnnnnnnnnnnnnnnnnnnnnnnnnnnnnnnnnnnnnnnnnnnnnnnnnnnnnnnnnnnnnnnnnnnnnnnnnnnnnnnnnnnnnnnnnnnnnnnnnnnnnnnnnnnnnnnnnnnnnnnnnnnnnnnnnnnnnnnnnnnnnnnnnnnnnnnnnnnnnnnnnnnnnnnnnnnnnnnnnnnnnnnnnnnnnnnnnnnnnnnnnnnnnnnnnnnnnnnnnnnnnnnnnnnnnnnnnnnnnnnnnnnnnnnnnnnnnnnnnnnnnnnnnnnnnnnnnnnnnnnnnnnnnnnnnnnnnnnnnnnnnnnnnnnnnnnnnnnnnnnnnnnnnnnnnnnnnnnnnnnnnnnnnnnnnnnnnnnnnnnnnnnnnnnnnnnnnnnnnnnnnnnnnnnnnnnnnnnnnnnnnnnnnnnnnnnnnnnnnnnnnnnnnnnnnnnnnnnnnnnnnnnnnnnnnnnnnnnnnnnnnnnnnnnnnnnnnnnnnnnnnnnnnnnnnnnnnnnnnnnnnnnnnnnnnnnnnnnnnnnnnnnnnnnnnnnnnnnnnnnnnnnnnnnnnnnnnnnnnnnnnnnnnnnnnnnnnnnnnnnnnnnnnnnnnnnnnnnnnnnnnnnnnnnnnnnnnnnnnnnnnnnnnnnnnnnnnnnnnnnnnnnnnnnnnnnnnnnnnnnnnnnnnnnnnnnnnnnnnnnnnnnnnnnnnnnnnnnnnnnnnnnnnnnnnnnnnnnnnnnnnnnnnnnnnnnnnnnnnnnnnnnnnnnnnnnnnnnnnnnnnnnnnnnnnnnnnnnnnnnnnnnnnnnnnnnnnnnnnnnnnnnnnnnnnnnnnnnnnnnnnnnnnnnnnnnnnnnnnnnnnnnnnnnnnnnnnnnnnnnnnnnnnnnnnnnnnnnnnnnnnnnnnnnnnnnnnnnnnnnnnnnnnnnnnnnnnnnnnnnnnnnnnnnnnnnnnnnnnnnnnnnnnnnnnnnnnnnnnnnnnnnnnnnnnnnnnnnnnnnnnnnnnnnnnnnnnnnnnnnnnnnnnnnnnnnnnnnnnnnnnnnnnnnnnnnnnnnnnnnnnnnnnnnnnnnnnnnnnnnnnnnnnnnnnnnnnnnnnnnnnnnnnnnnnnnnnnnnnnnnnnnnnnnnnnnnnnnnnnnnnnnnnnnnnnnnnnnnnnnnnnnnnnnnnnnnnnnnnnnnnnnnnnnnnnnnnnnnnnnnnnnnnnnnnnnnnnnnnnnnnnnnnnnnnnnnnnnnnnnnnnnnnnnnnnnnnnnnnnnnnnnnnnnnnnnnnnnnnnnnnnnnnnnnnnnnnnnnnnnnnnnnnnnnnnnnnnnnnnnnnnnnnnnnnnnnnnnnnnnnnnnnnnnnnnnnnnnnnnnnnnnnnnnnnnnnnnnnnnnnnnnnnnnnnnnnnnnnnnnnnnnnnnnnnnnnnnnnnnnnnnnnnnnnnnnnnnnnnnnnnnnnnnnnnnnnnnnnnnnnnnnnnnnnnnnnnnnnnnnnnnnnnnnnnnnnnnnnnnnnnnnnnnnnnnnnnnnnnnnnnnnnnnnnnnnnnnnnnnnnnnnnnnnnnnnnnnnnnnnnnnnnnnnnnnnnnnnnnnnnnnnnnnnnnnnnnnnnnnnnnnnnnnnnnnnnnnnnnnnnnnnnnnnnnnnnnnnnnnnnnnnnnnnnnnnnnnnnnnnnnnnnnnnnnnnnnnnnnnnnnnnnnnnnnnnnnnnnnnnnnnnnnnnnnnnnnnnnnnnnnnnnnnnnnnnnnnnnnnnnnnnnnnnnnnnnnnnnnnnnnnnnnnnnnnnnnnnnnnnnnnnnnnnnnnnnnnnnnnnnnnnnnnnnnnnnnnnnnnnnnnnnnnnnnnnnnnnnnnnnnnnnnnnnnnnnnnnnnnnnnnnnnnnnnnnnnnnnnnnnnnnnnnnnnnnnnnnnnnnnnnnnnnnnnnnnnnnnnnnnnnnnnnnnnnnnnnnnnnnnnnnnnnnnnnnnnnnnnnnnnnnnnnnnnnnnnnnnnnnnnnnnnnnnnnnnnnnnnnnnnnnnnnnnnnnnnnnnnnnnnnnnnnnnnnnnnnnnnnnnnnnnnnnnnnnnnnnnnnnnnnnnnnnnnnnnnnnnnnnnnnnnnnnnnnnnnnnnnnnnnnnnnnnnnnnnnnnnnnnnnnnnnnnnnnnnnnnnnnnnnnnnnnnnnnnnnnnnnnnnnnnnnnnnnnnnnnnnnnnnnnnnnnnnnnnnnnnnnnnnnnnnnnnnnnnnnnnnnnnnnnnnnnnnnnnnnnnnnnnnnnnnnnnnnnnnnnnnnnnnnnnnnnnnnnnnnnnnnnnnnnnnnnnnnnnnnnnnnnnnnnnnnnnnnnnnnnnnnnnnnnnnnnnnnnnnnnnnnnnnnnnnnnnnnnnnnnnnnnnnnnnnnnnnnnnnnnnnnnnnnnnnnnnnnnnnnnnnnnnnnnnnnnnnnnnnnnnnnnnnnnnnnnnnnnnnnnnnnnnnnnnnnnnnnnnnnnnnnnnnnnnnnnnnnnnnnnnnnnnnnnnnnnnnnnnnnnnnnnnnnnnnnnnnnnnnnnnnnnnnnnnnnnnnnnnnnnnnnnnnnnnnnnnnnnnnnnnnnnnnnnnnnnnnnnnnnnnnnnnnnnnnnnnnnnnnnnnnnnnnnnnnnnnnnnnnnnnnnnnnnnnnnnnnnnnnnnnnnnnnnnnnnnnnnnnnnnnnnnnnnnnnnnnnnnnnnnnnnnnnnnnnnnnnnnnnnnnnnnnnnnnnnnnnnnnnnnnnnnnnnnnnnnnnnnnnnnnnnnnnnnnnnnnnnnnnnnnnnnnnnnnnnnnnnnnnnnnnnnnnnnnnnnnnnnnnnnnnnnnnnnnnnnnnnnnnnnnnnnnnnnnnnnnnnnnnnnnnnnnnnnnnnnnnnnnnnnnnnnnnnnnnnnnnnnnnnnnnnnnnnnnnnnnnnnnnnnnnnnnnnnnnnnnnnnnnnnnnnnnnnnnnnnnnnnnnnnnnnnnnnnnnnnnnnnnnnnnnnnnnnnnnnnnnnnnnnnnnnnnnnnnnnnnnnnnnnnnnnnnnnnnnnnnnnnnnnnnnnnnnnnnnnnnnnnnnnnnnnnnnnnnnnnnnnnnnnnnnnnnnnnnnnnnnnnnnnnnnnnnnnnnnnnnnnnnnnnnnnnnnnnnnnnnnnnnnnnnnnnnnnnnnnnnnnnnnnnnnnnnnnnnnnnnnnnnnnnnnnnnnnnnnnnnnnnnnnnnnnnnnnnnnnnnnnnnnnnnnnnnnnnnnnnnnnnnnnnnnnnnnnnnnnnnnnnnnnnnnnnnnnnnnnnnnnnnnnnnnnnnnnnnnnnnnnnnnnnnnnnnnnnnnnnnnnnnnnnnnnnnnnnnnnnnnnnnnnnnnnnnnnnnnnnnnnnnnnnnnnnnnnnnnnnnnnnnnnnnnnnnnnnnnnnnnnnnnnnnnnnnnnnnnnnnnnnnnnnnnnnnnnnnnnnnnnnnnnnnnnnnnnnnnnnnnnnnnnnnnnnnnnnnnnnnnnnnnnnnnnnnnnnnnnnnnnnnnnnnnnnnnnnnnnnnnnnnnnnnnnnnnnnnnnnnnnnnnnnnnnnnnnnnnnnnnnnnnnnnnnnnnnnnnnnnnnnnnnnnnnnnnnnnnnnnnnnnnnnnnnnnnnnnnnnnnnnnnnnnnnnnnnnnnnnnnnnnnnnnnnnnnnnnnnnnnnnnnnnnnnnnnnnnnnnnnnnnnnnnnnnnnnnnnnnnnnnnnnnnnnnnnnnnnnnnnnnnnnnnnnnnnnnnnnnnnnnnnnnnnnnnnnnnnnnnnnnnnnnnnnnnnnnnnnnnnnnnnnnnnnnnnnnnnnnnnnnnnnnnnnnnnnnnnnnnnnnnnnnnnnnnnnnnnnnnnnnnnnnnnnnnnnnnnnnnnnnnnnnnnnnnnnnnnnnnnnnnnnnnnnnnnnnnnnnnnnnnnnnnnnnnnnnnnnnnnnnnnnnnnnnnnnnnnnnnnnnnnnnnnnnnnnnnnnnnnnnnnnnnnnnnnnnnnnnnnnnnnnnnnnnnnnnnnnnnnnnnnnnnnnnnnnnnnnnnnnnnnnnnnnnnnnnnnnnnnnnnnnnnnnnnnnnnnnnnnnnnnnnnnnnnnnnnnnnnnnnnnnnnnnnnnnnnnnnnnnnnnnnnnnnnnnnnnnnnnnnnnnnnnnnnnnnnnnnnnnnnnnnnnnnnnnnnnnnnnnnnnnnnnnnnnnnnnnnnnnnnnnnnnnnnnnnnnnnnnnnnnnnnnnnnnnnnnnnnnnnnnnnnnnnnnnnnnnnnnnnnnnnnnnnnnnnnnnnnnnnnnnnnnnnnnnnnnnnnnnnnnnnnnnnnnnnnnnnnnnnnnnnnnnnnnnnnnnnnnnnnnnnnnnnnnnnnnnnnnnnnnnnnnnnnnnnnnnnnnnnnnnnnnnnnnnnnnnnnnnnnnnnnnnnnnnnnnnnnnnnnnnnnnnnnnnnnnnnnnnnnnnnnnnnnnnnnnnnnnnnnnnnnnnnnnnnnnnnnnnnnnnnnnnnnnnnnnnnnnnnnnnnnnnnnnnnnnnnnnnnnnnnnnnnnnnnnnnnnnnnnnnnnnnnnnnnnnnnnnnnnnnnnnnnnnnnnnnnnnnnnnnnnnnnnnnnnnnnnnnnnnnnnnnnnnnnnnnnnnnnnnnnnnnnnnnnnnnnnnnnnnnnnnnnnnnnnnnnnnnnnnnnnnnnnnnnnnnnnnnnnnnnnnnnnnnnnnnnnnnnnnnnnnnnnnnnnnnnnnnnnnnnnnnnnnnnnnnnnnnnnnnnnnnnnnnnnnnnnnnnnnnnnnnnnnnnnnnnnnnnnnnnnnnnnnnnnnnnnnnnnnnnnnnnnnnnnnnnnnnnnnnnnnnnnnnnnnnnnnnnnnnnnnnnnnnnnnnnnnnnnnnnnnnnnnnnnnnnnnnnnnnnnnnnnnnnnnnnnnnnnnnnnnnnnnnnnnnnnnnnnnnnnnnnnnnnnnnnnnnnnnnnnnnnnnnnnnnnnnnnnnnnnnnnnnnnnnnnnnnnnnnnnnnnnnnnnnnnnnnnnnnnnnnnnnnnnnnnnnnnnnnnnnnnnnnnnnnnnnnnnnnnnnnnnnnnnnnnnnnnnnnnnnnnnnnnnnnnnnnnnnnnnnnnnnnnnnnnnnnnnnnnnnnnnnnnnnnnnnnnnnnnnnnnnnnnnnnnnnnnnnnnnnnnnnnnnnnnnnnnnnnnnnnnnnnnnnnnnnnnnnnnnnnnnnnnnnnnnnnnnnnnnnnnnnnnnnnnnnnnnnnnnnnnnnnnnnnnnnnnnnnnnnnnnnnnnnnnnnnnnnnnnnnnnnnnnnnnnnnnnnnnnnnnnnnnnnnnnnnnnnnnnnnnnnnnnnnnnnnnnnnnnnnnnnnnnnnnnnnnnnnnnnnnnnnnnnnnnnnnnnnnnnnnnnnnnnnnnnnnnnnnnnnnnnnnnnnnnnnnnnnnnnnnnnnnnnnnnnnnnnnnnnnnnnnnnnnnnnnnnnnnnnnnnnnnnnnnnnnnnnnnnnnnnnnnnnnnnnnnnnnnnnnnnnnnnnnnnnnnnnnnnnnnnnnnnnnnnnnnnnnnnnnnnnnnnnnnnnnnnnnnnnnnnnnnnnnnnnnnnnnnnnnnnnnnnnnnnnnnnnnnnnnnnnnnnnnnnnnnnnnnnnnnnnnnnnnnnnnnnnnnnnnnnnnnnnnnnnnnnnnnnnnnnnnnnnnnnnnnnnnnnnnnnnnnnnnnnnnnnnnnnnnnnnnnnnnnnnnnnnnnnnnnnnnnnnnnnnnnnnnnnnnnnnnnnnnnnnnnnnnnnnnnnnnnnnnnnnnnnnnnnnnnnnnnnnnnnnnnnnnnnnnnnnnnnnnnnnnnnnnnnnnnnnnnnnnnnnnnnnnnnnnnnnnnnnnnnnnnnnnnnnnnnnnnnnnnnnnnnnnnnnnnnnnnnnnnnnnnnnnnnnnnnnnnnnnnnnnnnnnnnnnnnnnnnnnnnnnnnnnnnnnnnnnnnnnnnnnnnnnnnnnnnnnnnnnnnnnnnnnnnnnnnnnnnnnnnnnnnnnnnnnnnnnnnnnnnnnnnnnnnnnnnnnnnnnnnnnnnnnnnnnnnnnnnnnnnnnnnnnnnnnnnnnnnnnnnnnnnnnnnnnnnnnnnnnnnnnnnnnnnnnnnnnnnnnnnnnnnnnnnnnnnnnnnnnnnnnnnnnnnnnnnnnnnnnnnnnnnnnnnnnnnnnnnnnnnnnnnnnnnnnnnnnnnnnnnnnnnnnnnnnnnnnnnnnnnnnnnnnnnnnnnnnnnnnnnnnnnnnnnnnnnnnnnnnnnnnnnnnnnnnnnnnnnnnnnnnnnnnnnnnnnnnnnnnnnnnnnnnnnnnnnnnnnnnnnnnnnnnnnnnnnnnnnnnnnnnnnnnnnnnnnnnnnnnnnnnnnnnnnnnnnnnnnnnnnnnnnnnnnnnnnnnnnnnnnnnnnnnnnnnnnnnnnnnnnnnnnnnnnnnnnnnnnnnnnnnnnnnnnnnnnnnnnnnnnnnnnnnnnnnnnnnnnnnnnnnnnnnnnnnnnnnnnnnnnnnnnnnnnnnnnnnnnnnnnnnnnnnnnnnnnnnnnnnnnnnnnnnnnnnnnnnnnnnnnnnnnnnnnnnnnnnnnnnnnnnnnnnnnnnnnnnnnnnnnnnnnnnnnnnnnnnnnnnnnnnnnnnnnnnnnnnnnnnnnnnnnnnnnnnnnnnnnnnnnnnnnnnnnnnnnnnnnnnnnnnnnnnnnnnnnnnnnnnnnnnnnnnnnnnnnnnnnnnnnnnnnnnnnnnnnnnnnnnnnnnnnnnnnnnnnnnnnnnnnnnnnnnnnnnnnnnnnnnnnnnnnnnnnnnnnnnnnnnnnnnnnnnnnnnnnnnnnnnnnnnnnnnnnnnnnnnnnnnnnnnnnnnnnnnnnnnnnnnnnnnnnnnnnnnnnnnnnnnnnnnnnnnnnnnnnnnnnnnnnnnnnnnnnnnnnnnnnnnnnnnnnnnnnnnnnnnnnnnnnnnnnnnnnnnnnnnnnnnnnnnnnnnnnnnnnnnnnnnnnnnnnnnnnnnnnnnnnnnnnnnnnnnnnnnnnnnnnnnnnnnnnnnnnnnnnnnnnnnnnnnnnnnnnnnnnnnnnnnnnnnnnnnnnnnnnnnnnnnnnnnnnnnnnnnnnnnnnnnnnnnnnnnnnnnnnnnnnnnnnnnnnnnnnnnnnnnnnnnnnnnnnnnnnnnnnnnnnnnnnnnnnnnnnnnnnnnnnnnnnnnnnnnnnnnnnnnnnnnnnnnnnnnnnnnnnnnnnnnnnnnnnnnnnnnnnnnnnnnnnnnnnnnnnnnnnnnnnnnnnnnnnnnnnnnnnnnnnnnnnnnnnnnnnnnnnnnnnnnnnnnnnnnnnnnnnnnnnnnnnnnnnnnnnnnnnnnnnnnnnnnnnnnnnnnnnnnnnnnnnnnnnnnnnnnnnnnnnnnnnnnnnnnnnnnnnnnnnnnnnnnnnnnnnnnnnnnnnnnnnnnnnnnnnnnnnnnnnnnnnnnnnnnnnnnnnnnnnnnnnnnnnnnnnnnnnnnnnnnnnnnnnnnnnnnnnnnnnnnnnnnnnnnnnnnnnnnnnnnnnnnnnnnnnnnnnnnnnnnnnnnnnnnnnnnnnnnnnnnnnnnnnnnnnnnnnnnnnnnnnnnnnnnnnnnnnnnnnnnnnnnnnnnnnnnnnnnnnnnnnnnnnnnnnnnnnnnnnnnnnnnnnnnnnnnnnnnnnnnnnnnnnnnnnnnnnnnnnnnnnnnnnnnnnnnnnnnnnnnnnnnnnnnnnnnnnnnnnnnnnnnnnnnnnnnnnnnnnnnnnnnnnnnnnnnnnnnnnnnnnnnnnnnnnnnnnnnnnnnnnnnnnnnnnnnnnnnnnnnnnnnnnnnnnnnnnnnnnnnnnnnnnnnnnnnnnnnnnnnnnnnnnnnnnnnnnnnnnnnnnnnnnnnnnnnnnnnnnnnnnnnnnnnnnnnnnnnnnnnnnnnnnnnnnnnnnnnnnnnnnnnnnnnnnnnnnnnnnnnnnnnnnnnnnnnnnnnnnnnnnnnnnnnnnnnnnnnnnnnnnnnnnnnnnnnnnnnnnnnnnnnnnnnnnnnnnnnnnnnnnnnnnnnnnnnnnnnnnnnnnnnnnnnnnnnnnnnnnnnnnnnnnnnnnnnnnnnnnnnnnnnnnnnnnnnnnnnnnnnnnnnnnnnnnnnnnnnnnnnnnnnnnnnnnnnnnnnnnnnnnnnnnnnnnnnnnnnnnnnnnnnnnnnnnnnnnnnnnnnnnnnnnnnnnnnnnnnnnnnnnnnnnnnnnnnnnnnnnnnnnnnnnnnnnnnnnnnnnnnnnnnnnnnnnnnnnnnnnnnnnnnnnnnnnnnnnnnnnnnnnnnnnnnnnnnnnnnnnnnnnnnnnnnnnnnnnnnnnnnnnnnnnnnnnnnnnnnnnnnnnnnnnnnnnnnnnnnnnnnnnnnnnnnnnnnnnnnnnnnnnnnnnnnnnnnnnnnnnnnnnnnnnnnnnnnnnnnnnnnnnnnnnnnnnnnnnnnnnnnnnnnnnnnnnnnnnnnnnnnnnnnnnnnnnnnnnnnnnnnnnnnnnnnnnnnnnnnnnnnnnnnnnnnnnnnnnnnnnnnnnnnnnnnnnnnnnnnnnnnnnnnnnnnnnnnnnnnnnnnnnnnnnnnnnnnnnnnnnnnnnnnnnnnnnnnnnnnnnnnnnnnnnnnnnnnnnnnnnnnnnnnnnnnnnnnnnnnnnnnnnnnnnnnnnnnnnnnnnnnnnnnnnnnnnnnnnnnnnnnnnnnnnnnnnnnnnnnnnnnnnnnnnnnnnnnnnnnnnnnnnnnnnnnnnnnnnnnnnnnnnnnnnnnnnnnnnnnnnnnnnnnnnnnnnnnnnnnnnnnnnnnnnnnnnnnnnnnnnnnnnnnnnnnnnnnnnnnnnnnnnnnnnnnnnnnnnnnnnnnnnnnnnnnnnnnnnnnnnnnnnnnnnnnnnnnnnnnnnnnnnnnnnnnnnnnnnnnnnnnnnnnnnnnnnnnnnnnnnnnnnnnnnnnnnnnnnnnnnnnnnnnnnnnnnnnnnnnnnnnnnnnnnnnnnnnnnnnnnnnnnnnnnnnnnnnnnnnnnnnnnnnnnnnnnnnnnnnnnnnnnnnnnnnnnnnnnnnnnnnnnnnnnnnnnnnnnnnnnnnnnnnnnnnnnnnnnnnnnnnnnnnnnnnnnnnnnnnnnnnnnnnnnnnnnnnnnnnnnnnnnnnnnnnnnnnnnnnnnnnnnnnnnnnnnnnnnnnnnnnnnnnnnnnnnnnnnnnnnnnnnnnnnnnnnnnnnnnnnnnnnnnnnnnnnnnnnnnnnnnnnnnnnnnnnnnnnnnnnnnnnnnnnnnnnnnnnnnnnnnnnnnnnnnnnnnnnnnnnnnnnnnnnnnnnnnnnnnnnnnnnnnnnnnnnnnnnnnnnnnnnnnnnnnnnnnnnnnnnnnnnnnnnnnnnnnnnnnnnnnnnnnnnnnnnnnnnnnnnnnnnnnnnnnnnnnnnnnnnnnnnnnnnnnnnnnnnnnnnnnnnnnnnnnnnnnnnnnnnnnnnnnnnnnnnnnnnnnnnnnnnnnnnnnnnnnnnnnnnnnnnnnnnnnnnnnnnnnnnnnnnnnnnnnnnnnnnnnnnnnnnnnnnnnnnnnnnnnnnnnnnnnnnnnnnnnnnnnnnnnnnnnnnnnnnnnnnnnnnnnnnnnnnnnnnnnnnnnnnnnnnnnnnnnnnnnnnnnnnnnnnnnnnnnnnnnnnnnnnnnnnnnnnnnnnnnnnnnnnnnnnnnnnnnnnnnnnnnnnnnnnnnnnnnnnnnnnnnnnnnnnnnnnnnnnnnnnnnnnnnnnnnnnnnnnnnnnnnnnnnnnnnnnnnnnnnnnnnnnnnnnnnnnnnnnnnnnnnnnnnnnnnnnnnnnnnnnnnnnnnnnnnnnnnnnnnnnnnnnnnnnnnnnnnnnnnnnnnnnnnnnnnnnnnnnnnnnnnnnnnnnnnnnnnnnnnnnnnnnnnnnnnnnnnnnnnnnnnnnnnnnnnnnnnnnnnnnnnnnnnnnnnnnnnnnnnnnnnnnnnnnnnnnnnnnnnnnnnnnnnnnnnnnnnnnnnnnnnnnnnnnnnnnnnnnnnnnnnnnnnnnnnnnnnnnnnnnnnnnnnnnnnnnnnnnnnnnnnnnnnnnnnnnnnnnnnnnnnnnnnnnnnnnnnnnnnnnnnnnnnnnnnnnnnnnnnnnnnnnnnnnnnnnnnnnnnnnnnnnnnnnnnnnnnnnnnnnnnnnnnnnnnnnnnnnnnnnnnnnnnnnnnnnnnnnnnnnnnnnnnnnnnnnnnnnnnnnnnnnnnnnnnnnnnnnnnnnnnnnnnnnnnnnnnnnnnnnnnnnnnnnnnnnnnnnnnnnnnnnnnnnnnnnnnnnnnnnnnnnnnnnnnnnnnnnnnnnnnnnnnnnnnnnnnnnnnnnnnnnnnnnnnnnnnnnnnnnnnnnnnnnnnnnnnnnnnnnnnnnnnnnnnnnnnnnnnnnnnnnnnnnnnnnnnnnnnnnnnnnnnnnnnnnnnnnnnnnnnnnnnnnnnnnnnnnnnnnnnnnnnnnnnnnnnnnnnnnnnnnnnnnnnnnnnnnnnnnnnnnnnnnnnnnnnnnnnnnnnnnnnnnnnnnnnnnnnnnnnnnnnnnnnnnnnnnnnnnnnnnnnnnnnnnnnnnnnnnnnnnnnnnnnnnnnnnnnnnnnnnnnnnnnnnnnnnnnnnnnnnnnnnnnnnnnnnnnnnnnnnnnnnnnnnnnnnnnnnnnnnnnnnnnnnnnnnnnnnnnnnnnnnnnnnnnnnnnnnnnnnnnnnnnnnnnnnnnnnnnnnnnnnnnnnnnnnnnnnnnnnnnnnnnnnnnnnnnnnnnnnnnnnnnnnnnnnnnnnnnnnnnnnnnnnnnnnnnnnnnnnnnnnnnnnnnnnnnnnnnnnnnnnnnnnnnnnnnnnnnnnnnnnnnnnnnnnnnnnnnnnnnnnnnnnnnnnnnnnnnnnnnnnnnnnnnnnnnnnnnnnnnnnnnnnnnnnnnnnnnnnnnnnnnnnnnnnnnnnnnnnnnnnnnnnnnnnnnnnnnnnnnnnnnnnnnnnnnnnnnnnnnnnnnnnnnnnnnnnnnnnnnnnnnnnnnnnnnnnnnnnnnnnnnnnnnnnnnnnnnnnnnnnnnnnnnnnnnnnnnnnnnnnnnnnnnnnnnnnnnnnnnnnnnnnnnnnnnnnnnnnnnnnnnnnnnnnnnnnnnnnnnnnnnnnnnnnnnnnnnnnnnnnnnnnnnnnnnnnnnnnnnnnnnnnnnnnnnnnnnnnnnnnnnnnnnnnnnnnnnnnnnnnnnnnnnnnnnnnnnnnnnnnnnnnnnnnnnnnnnnnnnnnnnnnnnnnnnnnnnnnnnnnnnnnnnnnnnnnnnnnnnnnnnnnnnnnnnnnnnnnnnnnnnnnnnnnnnnnnnnnnnnnnnnnnnnnnnnnnnnnnnnnnnnnnnnnnnnnnnnnnnnnnnnnnnnnnnnnnnnnnnnnnnnnnnnnnnnnnnnnnnnnnnnnnnnnnnnnnnnnnnnnnnnnnnnnnnnnnnnnnnnnnnnnnnnnnnnnnnnnnnnnnnnnnnnnnnnnnnnnnnnnnnnnnnnnnnnnnnnnnnnnnnnnnnnnnnnnnnnnnnnnnnnnnnnnnnnnnnnnnnnnnnnnnnnnnnnnnnnnnnnnnnnnnnnnnnnnnnnnnnnnnnnnnnnnnnnnnnnnnnnnnnnnnnnnnnnnnnnnnnnnnnnnnnnnnnnnnnnnnnnnnnnnnnnnnnnnnnnnnnnnnnnnnnnnnnnnnnnnnnnnnnnnnnnnnnnnnnnnnnnnnnnnnnnnnnnnnnnnnnnnnnnnnnnnnnnnnnnnnnnnnnnnnnnnnnnnnnnnnnnnnnnnnnnnnnnnnnnnnnnnnnnnnnnnnnnnnnnnnnnnnnnnnnnnnnnnnnnnnnnnnnnnnnnnnnnnnnnnnnnnnnnnnnnnnnnnnnnnnnnnnnnnnnnnnnnnnnnnnnnnnnnnnnnnnnnnnnnnnnnnnnnnnnnnnnnnnnnnnnnnnnnnnnnnnnnnnnnnnnnnnnnnnnnnnnnnnnnnnnnnnnnnnnnnnnnnnnnnnnnnnnnnnnnnnnnnnnnnnnnnnnnnnnnnnnnnnnnnnnnnnnnnnnnnnnnnnnnnnnnnnnnnnnnnnnnnnnnnnnnnnnnnnnnnnnnnnnnnnnnnnnnnnnnnnnnnnnnnnnnnnnnnnnnnnnnnnnnnnnnnnnnnnnnnnnnnnnnnnnnnnnnnnnnnnnnnnnnnnnnnnnnnnnnnnnnnnnnnnnnnnnnnnnnnnnnnnnnnnnnnnnnnnnnnnnnnnnnnnnnnnnnnnnnnnnnnnnnnnnnnnnnnnnnnnnnnnnnnnnnnnnnnnnnnnnnnnnnnnnnnnnnnnnnnnnnnnnnnnnnnnnnnnnnnnnnnnnnnnnnnnnnnnnnnnnnnnnnnnnnnnnnnnnnnnnnnnnnnnnnnnnnnnnnnnnnnnnnnnnnnnnnnnnnnnnnnnnnnnnnnnnnnnnnnnnnnnnnnnnnnnnnnnnnnnnnnnnnnnnnnnnnnnnnnnnnnnnnnnnnnnnnnnnnnnnnnnnnnnnnnnnnnnnnnnnnnnnnnnnnnnnnnnnnnnnnnnnnnnnnnnnnnnnnnnnnnnnnnnnnnnnnnnnnnnnnnnnnnnnnnnnnnnnnnnnnnnnnnnnnnnnnnnnnnnnnnnnnnnnnnnnnnnnnnnnnnnnnnnnnnnnnnnnnnnnnnnnnnnnnnnnnnnnnnnnnnnnnnnnnnnnnnnnnnnnnnnnnnnnnnnnnnnnnnnnnnnnnnnnnnnnnnnnnnnnnnnnnnnnnnnnnnnnnnnnnnnnnnnnnnnnnnnnnnnnnnnnnnnnnnnnnnnnnnnnnnnnnnnnnnnnnnnnnnnnnnnnnnnnnnnnnnnnnnnnnnnnnnnnnnnnnnnnnnnnnnnnnnnnnnnnnnnnnnnnnnnnnnnnnnnnnnnnnnnnnnnnnnnnnnnnnnnnnnnnnnnnnnnnnnnnnnnnnnnnnnnnnnnnnnnnnnnnnnnnnnnnnnnnnnnnnnnnnnnnnnnnnnnnnnnnnnnnnnnnnnnnnnnnnnnnnnnnnnnnnnnnnnnnnnnnnnnnnnnnnnnnnnnnnnnnnnnnnnnnnnnnnnnnnnnnnnnnnnnnnnnnnnnnnnnnnnnnnnnnnnnnnnnnnnnnnnnnnnnnnnnnnnnnnnnnnnnnnnnnnnnnnnnnnnnnnnnnnnnnnnnnnnnnnnnnnnnnnnnnnnnnnnnnnnnnnnnnnnnnnnnnnnnnnnnnnnnnnnnnnnnnnnnnnnnnnnnnnnnnnnnnnnnnnnnnnnnnnnnnnnnnnnnnnnnnnnnnnnnnnnnnnnnnnnnnnnnnnnnnnnnnnnnnnnnnnnnnnnnnnnnnnnnnnnnnnnnnnnnnnnnnnnnnnnnnnnnnnnnnnnnnnnnnnnnnnnnnnnnnnnnnnnnnnnnnnnnnnnnnnnnnnnnnnnnnnnnnnnnnnnnnnnnnnnnnnnnnnnnnnnnnnnnnnnnnnnnnnnnnnnnnnnnnnnnnnnnnnnnnnnnnnnnnnnnnnnnnnnnnnnnnnnnnnnnnnnnnnnnnnnnnnnnnnnnnnnnnnnnnnnnnnnnnnnnnnnnnnnnnnnnnnnnnnnnnnnnnnnnnnnnnnnnnnnnnnnnnnnnnnnnnnnnnnnnnnnnnnnnnnnnnnnnnnnnnnnnnnnnnnnnnnnnnnnnnnnnnnnnnnnnnnnnnnnnnnnnnnnnnnnnnnnnnnnnnnnnnnnnnnnnnnnnnnnnnnnnnnnnnnnnnnnnnnnnnnnnnnnnnnnnnnnnnnnnnnnnnnnnnnnnnnnnnnnnnnnnnnnnnnnnnnnnnnnnnnnnnnnnnnnnnnnnnnnnnnnnnnnnnnnnnnnnnnnnnnnnnnnnnnnnnnnnnnnnnnnnnnnnnnnnnnnnnnnnnnnnnnnnnnnnnnnnnnnnnnnnnnnnnnnnnnnnnnnnnnnnnnnnnnnnnnnnnnnnnnnnnnnnnnnnnnnnnnnnnnnnnnnnnnnnnnnnnnnnnnnnnnnnnnnnnnnnnnnnnnnnnnnnnnnnnnnnnnnnnnnnnnnnnnnnnnnnnnnnnnnnnnnnnnnnnnnnnnnnnnnnnnnnnnnnnnnnnnnnnnnnnnnnnnnnnnnnnnnnnnnnnnnnnnnnnnnnnnnnnnnnnnnnnnnnnnnnnnnnnnnnnnnnnnnnnnnnnnnnnnnnnnnnnnnnnnnnnnnnnnnnnnnnnnnnnnnnnnnnnnnnnnnnnnnnnnnnnnnnnnnnnnnnnnnnnnnnnnnnnnnnnnnnnnnnnnnnnnnnnnnnnnnnnnnnnnnnnnnnnnnnnnnnnnnnnnnnnnnnnnnnnnnnnnnnnnnnnnnnnnnnnnnnnnnnnnnnnnnnnnnnnnnnnnnnnnnnnnnnnnnnnnnnnnnnnnnnnnnnnnnnnnnnnnnnnnnnnnnnnnnnnnnnnnnnnnnnnnnnnnnnnnnnnnnnnnnnnnnnnnnnnnnnnnnnnnnnnnnnnnnnnnnnnnnnnnnnnnnnnnnnnnnnnnnnnnnnnnnnnnnnnnnnnnnnnnnnnnnnnnnnnnnnnnnnnnnnnnnnnnnnnnnnnnnnnnnnnnnnnnnnnnnnnnnnnnnnnnnnnnnnnnnnnnnnnnnnnnnnnnnnnnnnnnnnnnnnnnnnnnnnnnnnnnnnnnnnnnnnnnnnnnnnnnnnnnnnnnnnnnnnnnnnnnnnnnnnnnnnnnnnnnnnnnnnnnnnnnnnnnnnnnnnnnnnnnnnnnnnnnnnnnnnnnnnnnnnnnnnnnnnnnnnnnnnnnnnnnnnnnnnnnnnnnnnnnnnnnnnnnnnnnnnnnnnnnnnnnnnnnnnnnnnnnnnnnnnnnnnnnnnnnnnnnnnnnnnnnnnnnnnnnnnnnnnnnnnnnnnnnnnnnnnnnnnnnnnnnnnnnnnnnnnnnnnnnnnnnnnnnnnnnnnnnnnnnnnnnnnnnnnnnnnnnnnnnnnnnnnnnnnnnnnnnnnnnnnnnnnnnnnnnnnnnnnnnnnnnnnnnnnnnnnnnnnnnnnnnnnnnnnnnnnnnnnnnnnnnnnnnnnnnnnnnnnnnnnnnnnnnnnnnnnnnnnnnnnnnnnnnnnnnnnnnnnnnnnnnnnnnnnnnnnnnnnnnnnnnnnnnnnnnnnnnnnnnnnnnnnnnnnnnnnnnnnnnnnnnnnnnnnnnnnnnnnnnnnnnnnnnnnnnnnnnnnnnnnnnnnnnnnnnnnnnnnnnnnnnnnnnnnnnnnnnnnnnnnnnnnnnnnnnnnnnnnnnnnnnnnnnnnnnnnnnnnnnnnnnnnnnnnnnnnnnnnnnnnnnnnnnnnnnnnnnnnnnnnnnnnnnnnnnnnnnnnnnnnnnnnnnnnnnnnnnnnnnnnnnnnnnnnnnnnnnnnnnnnnnnnnnnnnnnnnnnnnnnnnnnnnnnnnnnnnnnnnnnnnnnnnnnnnnnnnnnnnnnnnnnnnnnnnnnnnnnnnnnnnnnnnnnnnnnnnnnnnnnnnnnnnnnnnnnnnnnnnnnnnnnnnnnnnnnnnnnnnnnnnnnnnnnnnnnnnnnnnnnnnnnnnnnnnnnnnnnnnnnnnnnnnnnnnnnnnnnnnnnnnnnnnnnnnnnnnnnnnnnnnnnnnnnnnnnnnnnnnnnnnnnnnnnnnnnnnnnnnnnnnnnnnnnnnnnnnnnnnnnnnnnnnnnnnnnnnnnnnnnnnnnnnnnnnnnnnnnnnnnnnnnnnnnnnnnnnnnnnnnnnnnnnnnnnnnnnnnnnnnnnnnnnnnnnnnnnnnnnnnnnnnnnnnnnnnnnnnnnnnnnnnnnnnnnnnnnnnnnnnnnnnnnnnnnnnnnnnnnnnnnnnnnnnnnnnnnnnnnnnnnnnnnnnnnnnnnnnnnnnnnnnnnnnnnnnnnnnnnnnnnnnnnnnnnnnnnnnnnnnnnnnnnnnnnnnnnnnnnnnnnnnnnnnnnnnnnnnnnnnnnnnnnnnnnnnnnnnnnnnnnnnnnnnnnnnnnnnnnnnnnnnnnnnnnnnnnnnnnnnnnnnnnnnnnnnnnnnnnnnnnnnnnnnnnnnnnnnnnnnnnnnnnnnnnnnnnnnnnnnnnnnnnnnnnnnnnnnnnnnnnnnnnnnnnnnnnnnnnnnnnnnnnnnnnnnnnnnnnnnnnnnnnnnnnnnnnnnnnnnnnnnnnnnnnnnnnnnnnnnnnnnnnnnnnnnnnnnnnnnnnnnnnnnnnnnnnnnnnnnnnnnnnnnnnnnnnnnnnnnnnnnnnnnnnnnnnnnnnnnnnnnnnnnnnnnnnnnnnnnnnnnnnnnnnnnnnnnnnnnnnnnnnnnnnnnnnnnnnnnnnnnnnnnnnnnnnnnnnnnnnnnnnnnnnnnnnnnnnnnnnnnnnnnnnnnnnnnnnnnnnnnnnnnnnnnnnnnnnnnnnnnnnnnnnnnnnnnnnnnnnnnnnnnnnnnnnnnnnnnnnnnnnnnnnnnnnnnnnnnnnnnnnnnnnnnnnnnnnnnnnnnnnnnnnnnnnnnnnnnnnnnnnnnnnnnnnnnnnnnnnnnnnnnnnnnnnnnnnnnnnnnnnnnnnnnnnnnnnnnnnnnnnnnnnnnnnnnnnnnnnnnnnnnnnnnnnnnnnnnnnnnnnnnnnnnnnnnnnnnnnnnnnnnnnnnnnnnnnnnnnnnnnnnnnnnnnnnnnnnnnnnnnnnnnnnnnnnnnnnnnnnnnnnnnnnnnnnnnnnnnnnnnnnnnnnnnnnnnnnnnnnnnnnnnnnnnnnnnnnnnnnnnnnnnnnnnnnnnnnnnnnnnnnnnnnnnnnnnnnnnnnnnnnnnnnnnnnnnnnnnnnnnnnnnnnnnnnnnnnnnnnnnnnnnnnnnnnnnnnnnnnnnnnnnnnnnnnnnnnnnnnnnnnnnnnnnnnnnnnnnnnnnnnnnnnnnnnnnnnnnnnnnnnnnnnnnnnnnnnnnnnnnnnnnnnnnnnnnnnnnnnnnnnnnnnnnnnnnnnnnnnnnnnnnnnnnnnnnnnnnnnnnnnnnnnnnnnnnnnnnnnnnnnnnnnnnnnnnnnnnnnnnnnnnnnnnnnnnnnnnnnnnnnnnnnnnnnnnnnnnnnnnnnnnnnnnnnnnnnnnnnnnnnnnnnnnnnnnnnnnnnnnnnnnnnnnnnnnnnnnnnnnnnnnnnnnnnnnnnnnnnnnnnnnnnnnnnnnnnnnnnnnnnnnnnnnnnnnnnnnnnnnnnnnnnnnnnnnnnnnnnnnnnnnnnnnnnnnnnnnnnnnnnnnnnnnnnnnnnnnnnnnnnnnnnnnnnnnnnnnnnnnnnnnnnnnnnnnnnnnnnnnnnnnnnnnnnnnnnnnnnnnnnnnnnnnnnnnnnnnnnnnnnnnnnnnnnnnnnnnnnnnnnnnnnnnnnnnnnnnnnnnnnnnnnnnnnnnnnnnnnnnnnnnnnnnnnnnnnnnnnnnnnnnnnnnnnnnnnnnnnnnnnnnnnnnnnnnnnnnnnnnnnnnnnnnnnnnnnnnnnnnnnnnnnnnnnnnnnnnnnnnnnnnnnnnnnnnnnnnnnnnnnnnnnnnnnnnnnnnnnnnnnnnnnnnnnnnnnnnnnnnnnnnnnnnnnnnnnnnnnnnnnnnnnnnnnnnnnnnnnnnnnnnnnnnnnnnnnnnnnnnnnnnnnnnnnnnnnnnnnnnnnnnnnnnnnnnnnnnnnnnnnnnnnnnnnnnnnnnnnnnnnnnnnnnnnnnnnnnnnnnnnnnnnnnnnnnnnnnnnnnnnnnnnnnnnnnnnnnnnnnnnnnnnnnnnnnnnnnnnnnnnnnnnnnnnnnnnnnnnnnnnnnnnnnnnnnnnnnnnnnnnnnnnnnnnnnnnnnnnnnnnnnnnnnnnnnnnnnnnnnnnnnnnnnnnnnnnnnnnnnnnnnnnnnnnnnnnnnnnnnnnnnnnnnnnnnnnnnnnnnnnnnnnnnnnnnnnnnnnnnnnnnnnnnnnnnnnnnnnnnnnnnnnnnnnnnnnnnnnnnnnnnnnnnnnnnnnnnnnnnnnnnnnnnnnnnnnnnnnnnnnnnnnnnnnnnnnnnnnnnnnnnnnnnnnnnnnnnnnnnnnnnnnnnnnnnnnnnnnnnnnnnnnnnnnnnnnnnnnnnnnnnnnnnnnnnnnnnnnnnnnnnnnnnnnnnnnnnnnnnnnnnnnnnnnnnnnnnnnnnnnnnnnnnnnnnnnnnnnnnnnnnnnnnnnnnnnnnnnnnnnnnnnnnnnnnnnnnnnnnnnnnnnnnnnnnnnnnnnnnnnnnnnnnnnnnnnnnnnnnnnnnnnnnnnnnnnnnnnnnnnnnnnnnnnnnnnnnnnnnnnnnnnnnnnnnnnnnnnnnnnnnnnnnnnnnnnnnnnnnnnnnnnnnnnnnnnnnnnnnnnnnnnnnnnnnnnnnnnnnnnnnnnnnnnnnnnnnnnnnnnnnnnnnnnnnnnnnnnnnnnnnnnnnnnnnnnnnnnnnnnnnnnnnnnnnnnnnnnnnnnnnnnnnnnnnnnnnnnnnnnnnnnnnnnnnnnnnnnnnnnnnnnnnnnnnnnnnnnnnnnnnnnnnnnnnnnnnnnnnnnnnnnnnnnnnnnnnnnnnnnnnnnnnnnnnnnnnnnnnnnnnnnnnnnnnnnnnnnnnnnnnnnnnnnnnnnnnnnnnnnnnnnnnnnnnnnnnnnnnnnnnnnnnnnnnnnnnnnnnnnnnnnnnnnnnnnnnnnnnnnnnnnnnnnnnnnnnnnnnnnnnnnnnnnnnnnnnnnnnnnnnnnnnnnnnnnnnnnnnnnnnnnnnnnnnnnnnnnnnnnnnnnnnnnnnnnnnnnnnnnnnnnnnnnnnnnnnnnnnnnnnnnnnnnnnnnnnnnnnnnnnnnnnnnnnnnnnnnnnnnnnnnnnnnnnnnnnnnnnnnnnnnnnnnnnnnnnnnnnnnnnnnnnnnnnnnnnnnnnnnnnnnnnnnnnnnnnnnnnnnnnnnnnnnnnnnnnnnnnnnnnnnnnnnnnnnnnnnnnnnnnnnnnnnnnnnnnnnnnnnnnnnnnnnnnnnnnnnnnnnnnnnnnnnnnnnnnnnnnnnnnnnnnnnnnnnnnnnnnnnnnnnnnnnnnnnnnnnnnnnnnnnnnnnnnnnnnnnnnnnnnnnnnnnnnnnnnnnnnnnnnnnnnnnnnnnnnnnnnnnnnnnnnnnnnnnnnnnnnnnnnnnnnnnnnnnnnnnnnnnnnnnnnnnnnnnnnnnnnnnnnnnnnnnnnnnnnnnnnnnnnnnnnnnnnnnnnnnnnnnnnnnnnnnnnnnnnnnnnnnnnnnnnnnnnnnnnnnnnnnnnnnnnnnnnnnnnnnnnnnnnnnnnnnnnnnnnnnnnnnnnnnnnnnnnnnnnnnnnnnnnnnnnnnnnnnnnnnnnnnnnnnnnnnnnnnnnnnnnnnnnnnnnnnnnnnnnnnnnnnnnnnnnnnnnnnnnnnnnnnnnnnnnnnnnnnnnnnnnnnnnnnnnnnnnnnnnnnnnnnnnnnnnnnnnnnnnnnnnnnnnnnnnnnnnnnnnnnnnnnnnnnnnnnnnnnnnnnnnnnnnnnnnnnnnnnnnnnnnnnnnnnnnnnnnnnnnnnnnnnnnnnnnnnnnnnnnnnnnnnnnnnnnnnnnnnnnnnnnnnnnnnnnnnnnnnnnnnnnnnnnnnnnnnnnnnnnnnnnnnnnnnnnnnnnnnnnnnnnnnnnnnnnnnnnnnnnnnnnnnnnnnnnnnnnnnnnnnnnnnnnnnnnnnnnnnnnnnnnnnnnnnnnnnnnnnnnnnnnnnnnnnnnnnnnnnnnnnnnnnnnnnnnnnnnnnnnnnnnnnnnnnnnnnnnnnnnnnnnnnnnnnnnnnnnnnnnnnnnnnnnnnnnnnnnnnnnnnnnnnnnnnnnnnnnnnnnnnnnnnnnnnnnnnnnnnnnnnnnnnnnnnnnnnnnnnnnnnnnnnnnnnnnnnnnnnnnnnnnnnnnnnnnnnnnnnnnnnnnnnnnnnnnnnnnnnnnnnnnnnnnnnnnnnnnnnnnnnnnnnnnnnnnnnnnnnnnnnnnnnnnnnnnnnnnnnnnnnnnnnnnnnnnnnnnnnnnnnnnnnnnnnnnnnnnnnnnnnnnnnnnnnnnnnnnnnnnnnnnnnnnnnnnnnnnnnnnnnnnnnnnnnnnnnnnnnnnnnnnnnnnnnnnnnnnnnnnnnnnnnnnnnnnnnnnnnnnnnnnnnnnnnnnnnnnnnnnnnnnnnnnnnnnnnnnnnnnnnnnnnnnnnnnnnnnnnnnnnnnnnnnnnnnnnnnnnnnnnnnnnnnnnnnnnnnnnnnnnnnnnnnnnnnnnnnnnnnnnnnnnnnnnnnnnnnnnnnnnnnnnnnnnnnnnnnnnnnnnnnnnnnnnnnnnnnnnnnnnnnnnnnnnnnnnnnnnnnnnnnnnnnnnnnnnnnnnnnnnnnnnnnnnnnnnnnnnnnnnnnnnnnnnnnnnnnnnnnnnnnnnnnnnnnnnnnnnnnnnnnnnnnnnnnnnnnnnnnnnnnnnnnnnnnnnnnnnnnnnnnnnnnnnnnnnnnnnnnnnnnnnnnnnnnnnnnnnnnnnnnnnnnnnnnnnnnnnnnnnnnnnnnnnnnnnnnnnnnnnnnnnnnnnnnnnnnnnnnnnnnnnnnnnnnnnnnnnnnnnnnnnnnnnnnnnnnnnnnnnnnnnnnnnnnnnnnnnnnnnnnnnnnnnnnnnnnnnnnnnnnnnnnnnnnnnnnnnnnnnnnnnnnnnnnnnnnnnnnnnnnnnnnnnnnnnnnnnnnnnnnnnnnnnnnnnnnnnnnnnnnnnnnnnnnnnnnnnnnnnnnnnnnnnnnnnnnnnnnnnnnnnnnnnnnnnnnnnnnnnnnnnnnnnnnnnnnnnnnnnnnnnnnnnnnnnnnnnnnnnnnnnnnnnnnnnnnnnnnnnnnnnnnnnnnnnnnnnnnnnnnnnnnnnnnnnnnnnnnnnnnnnnnnnnnnnnnnnnnnnnnnnnnnnnnnnnnnnnnnnnnnnnnnnnnnnnnnnnnnnnnnnnnnnnnnnnnnnnnnnnnnnnnnnnnnnnnnnnnnnnnnnnnnnnnnnnnnnnnnnnnnnnnnnnnnnnnnnnnnnnnnnnnnnnnnnnnnnnnnnnnnnnnnnnnnnnnnnnnnnnnnnnnnnnnnnnnnnnnnnnnnnnnnnnnnnnnnnnnnnnnnnnnnnnnnnnnnnnnnnnnnnnnnnnnnnnnnnnnnnnnnnnnnnnnnnnnnnnnnnnnnnnnnnnnnnnnnnnnnnnnnnnnnnnnnnnnnnnnnnnnnnnnnnnnnnnnnnnnnnnnnnnnnnnnnnnnnnnnnnnnnnnnnnnnnnnnnnnnnnnnnnnnnnnnnnnnnnnnnnnnnnnnnnnnnnnnnnnnnnnnnnnnnnnnnnnnnnnnnnnnnnnnnnnnnnnnnnnnnnnnnnnnnnnnnnnnnnnnnnnnnnnnnnnnnnnnnnnnnnnnnnnnnnnnnnnnnnnnnnnnnnnnnnnnnnnnnnnnnnnnnnnnnnnnnnnnnnnnnnnnnnnnnnnnnnnnnnnnnnnnnnnnnnnnnnnnnnnnnnnnnnnnnnnnnnnnnnnnnnnnnnnnnnnnnnnnnnnnnnnnnnnnnnnnnnnnnnnnnnnnnnnnnnnnnnnnnnnnnnnnnnnnnnnnnnnnnnnnnnnnnnnnnnnnnnnnnnnnnnnnnnnnnnnnnnnnnnnnnnnnnnnnnnnnnnnnnnnnnnnnnnnnnnnnnnnnnnnnnnnnnnnnnnnnnnnnnnnnnnnnnnnnnnnnnnnnnnnnnnnnnnnnnnnnnnnnnnnnnnnnnnnnnnnnnnnnnnnnnnnnnnnnnnnnnnnnnnnnnnnnnnnnnnnnnnnnnnnnnnnnnnnnnnnnnnnnnnnnnnnnnnnnnnnnnnnnnnnnnnnnnnnnnnnnnnnnnnnnnnnnnnnnnnnnnnnnnnnnnnnnnnnnnnnnnnnnnnnnnnnnnnnnnnnnnnnnnnnnnnnnnnnnnnnnnnnnnnnnnnnnnnnnnnnnnnnnnnnnnnnnnnnnnnnnnnnnnnnnnnnnnnnnnnnnnnnnnnnnnnnnnnnnnnnnnnnnnnnnnnnnnnnnnnnnnnnnnnnnnnnnnnnnnnnnnnnnnnnnnnnnnnnnnnnnnnnnnnnnnnnnnnnnnnnnnnnnnnnnnnnnnnnnnnnnnnnnnnnnnnnnnnnnnnnnnnnnnnnnnnnnnnnnnnnnnnnnnnnnnnnnnnnnnnnnnnnnnnnnnnnnnnnnnnnnnnnnnnnnnnnnnnnnnnnnnnnnnnnnnnnnnnnnnnnnnnnnnnnnnnnnnnnnnnnnnnnnnnnnnnnnnnnnnnnnnnnnnnnnnnnnnnnnnnnnnnnnnnnnnnnnnnnnnnnnnnnnnnnnnnnnnnnnnnnnnnnnnnnnnnnnnnnnnnnnnnnnnnnnnnnnnnnnnnnnnnnnnnnnnnnnnnnnnnnnnnnnnnnnnnnnnnnnnnnnnnnnnnnnnnnnnnnnnnnnnnnnnnnnnnnnnnnnnnnnnnnnnnnnnnnnnnnnnnnnnnnnnnnnnnnnnnnnnnnnnnnnnnnnnnnnnnnnnnnnnnnnnnnnnnnnnnnnnnnnnnnnnnnnnnnnnnnnnnnnnnnnnnnnnnnnnnnnnnnnnnnnnnnnnnnnnnnnnnnnnnnnnnnnnnnnnnnnnnnnnnnnnnnnnnnnnnnnnnnnnnnnnnnnnnnnnnnnnnnnnnnnnnnnnnnnnnnnnnnnnnnnnnnnnnnnnnnnnnnnnnnnnnnnnnnnnnnnnnnnnnnnnnnnnnnnnnnnnnnnnnnnnnnnnnnnnnnnnnnnnnnnnnnnnnnnnnnnnnnnnnnnnnnnnnnnnnnnnnnnnnnnnnnnnnnnnnnnnnnnnnnnnnnnnnnnnnnnnnnnnnnnnnnnnnnnnnnnnnnnnnnnnnnnnnnnnnnnnnnnnnnnnnnnnnnnnnnnnnnnnnnnnnnnnnnnnnnnnnnnnnnnnnnnnnnnnnnnnnnnnnnnnnnnnnnnnnnnnnnnnnnnnnnnnnnnnnnnnnnnnnnnnnnnnnnnnnnnnnnnnnnnnnnnnnnnnnnnnnnnnnnnnnnnnnnnnnnnnnnnnnnnnnnnnnnnnnnnnnnnnnnnnnnnnnnnnnnnnnnnnnnnnnnnnnnnnnnnnnnnnnnnnnnnnnnnnnnnnnnnnnnnnnnnnnnnnnnnnnnnnnnnnnnnnnnnnnnnnnnnnnnnnnnnnnnnnnnnnnnnnnnnnnnnnnnnnnnnnnnnnnnnnnnnnnnnnnnnnnnnnnnnnnnnnnnnnnnnnnnnnnnnnnnnnnnnnnnnnnnnnnnnnnnnnnnnnnnnnnnnnnnnnnnnnnnnnnnnnnnnnnnnnnnnnnnnnnnnnnnnnnnnnnnnnnnnnnnnnnnnnnnnnnnnnnnnnnnnnnnnnnnnnnnnnnnnnnnnnnnnnnnnnnnnnnnnnnnnnnnnnnnnnnnnnnnnnnnnnnnnnnnnnnnnnnnnnnnnnnnnnnnnnnnnnnnnnnnnnnnnnnnnnnnnnnnnnnnnnnnnnnnnnnnnnnnnnnnnnnnnnnnnnnnnnnnnnnnnnnnnnnnnnnnnnnnnnnnnnnnnnnnnnnnnnnnnnnnnnnnnnnnnnnnnnnnnnnnnnnnnnnnnnnnnnnnnnnnnnnnnnnnnnnnnnnnnnnnnnnnnnnnnnnnnnnnnnnnnnnnnnnnnnnnnnnnnnnnnnnnnnnnnnnnnnnnnnnnnnnnnnnnnnnnnnnnnnnnnnnnnnnnnnnnnnnnnnnnnnnnnnnnnnnnnnnnnnnnnnnnnnnnnnnnnnnnnnnnnnnnnnnnnnnnnnnnnnnnnnnnnnnnnnnnnnnnnnnnnnnnnnnnnnnnnnnnnnnnnnnnnnnnnnnnnnnnnnnnnnnnnnnnnnnnnnnnnnnnnnnnnnnnnnnnnnnnnnnnnnnnnnnnnnnnnnnnnnnnnnnnnnnnnnnnnnnnnnnnnnnnnnnnnnnnnnnnnnnnnnnnnnnnnnnnnnnnnnnnnnnnnnnnnnnnnnnnnnnnnnnnnnnnnnnnnnnnnnnnnnnnnnnnnnnnnnnnnnnnnnnnnnnnnnnnnnnnnnnnnnnnnnnnnnnnnnnnnnnnnnnnnnnnnnnnnnnnnnnnnnnnnnnnnnnnnnnnnnnnnnnnnnnnnnnnnnnnnnnnnnnnnnnnnnnnnnnnnnnnnnnnnnnnnnnnnnnnnnnnnnnnnnnnnnnnnnnnnnnnnnnnnnnnnnnnnnnnnnnnnnnnnnnnnnnnnnnnnnnnnnnnnnnnnnnnnnnnnnnnnnnnnnnnnnnnnnnnnnnnnnnnnnnnnnnnnnnnnnnnnnnnnnnnnnnnnnnnnnnnnnnnnnnnnnnnnnnnnnnnnnnnnnnnnnnnnnnnnnnnnnnnnnnnnnnnnnnnnnnnnnnnnnnnnnnnnnnnnnnnnnnnnnnnnnnnnnnnnnnnnnnnnnnnnnnnnnnnnnnnnnnnnnnnnnnnnnnnnnnnnnnnnnnnnnnnnnnnnnnnnnnnnnnnnnnnnnnnnnnnnnnnnnnnnnnnnnnnnnnnnnnnnnnnnnnnnnnnnnnnnnnnnnnnnnnnnnnnnnnnnnnnnnnnnnnnnnnnnnnnnnnnnnnnnnnnnnnnnnnnnnnnnnnnnnnnnnnnnnnnnnnnnnnnnnnnnnnnnnnnnnnnnnnnnnnnnnnnnnnnnnnnnnnnnnnnnnnnnnnnnnnnnnnnnnnnnnnnnnnnnnnnnnnnnnnnnnnnnnnnnnnnnnnnnnnnnnnnnnnnnnnnnnnnnnnnnnnnnnnnnnnnnnnnnnnnnnnnnnnnnnnnnnnnnnnnnnnnnnnnnnnnnnnnnnnnnnnnnnnnnnnnnnnnnnnnnnnnnnnnnnnnnnnnnnnnnnnnnnnnnnnnnnnnnnnnnnnnnnnnnnnnnnnnnnnnnnnnnnnnnnnnnnnnnnnnnnnnnnnnnnnnnnnnnnnnnnnnnnnnnnnnnnnnnnnnnnnnnnnnnnnnnnnnnnnnnnnnnnnnnnnnnnnnnnnnnnnnnnnnnnnnnnnnnnnnnnnnnnnnnnnnnnnnnnnnnnnnnnnnnnnnnnnnnnnnnnnnnnnnnnnnnnnnnnnnnnnnnnnnnnnnnnnnnnnnnnnnnnnnnnnnnnnnnnnnnnnnnnnnnnnnnnnnnnnnnnnnnnnnnnnnnnnnnnnnnnnnnnnnnnnnnnnnnnnnnnnnnnnnnnnnnnnnnnnnnnnnnnnnnnnnnnnnnnnnnnnnnnnnnnnnnnnnnnnnnnnnnnnnnnnnnnnnnnnnnnnnnnnnnnnnnnnnnnnnnnnnnnnnnnnnnnnnnnnnnnnnnnnnnnnnnnnnnnnnnnnnnnnnnnnnnnnnnnnnnnnnnnnnnnnnnnnnnnnnnnnnnnnnnnnnnnnnnnnnnnnnnnnnnnnnnnnnnnnnnnnnnnnnnnnnnnnnnnnnnnnnnnnnnnnnnnnnnnnnnnnnnnnnnnnnnnnnnnnnnnnnnnnnnnnnnnnnnnnnnnnnnnnnnnnnnnnnnnnnnnnnnnnnnnnnnnnnnnnnnnnnnnnnnnnnnnnnnnnnnnnnnnnnnnnnnnnnnnnnnnnnnnnnnnnnnnnnnnnnnnnnnnnnnnnnnnnnnnnnnnnnnnnnnnnnnnnnnnnnnnnnnnnnnnnnnnnnnnnnnnnnnnnnnnnnnnnnnnnnnnnnnnnnnnnnnnnnnnnnnnnnnnnnnnnnnnnnnnnnnnnnnnnnnnnnnnnnnnnnnnnnnnnnnnnnnnnnnnnnnnnnnnnnnnnnnnnnnnnnnnnnnnnnnnnnnnnnnnnnnnnnnnnnnnnnnnnnnnnnnnnnnnnnnnnnnnnnnnnnnnnnnnnnnnnnnnnnnnnnnnnnnnnnnnnnnnnnnnnnnnnnnnnnnnnnnnnnnnnnnnnnnnnnnnnnnnnnnnnnnnnnnnnnnnnnnnnnnnnnnnnnnnnnnnnnnnnnnnnnnnnnnnnnnnnnnnnnnnnnnnnnnnnnnnnnnnnnnnnnnnnnnnnnnnnnnnnnnnnnnnnnnnnnnnnnnnnnnnnnnnnnnnnnnnnnnnnnnnnnnnnnnnnnnnnnnnnnnnnnnnnnnnnnnnnnnnnnnnnnnnnnnnnnnnnnnnnnnnnnnnnnnnnnnnnnnnnnnnnnnnnnnnnnnnnnnnnnnnnnnnnnnnnnnnnnnnnnnnnnnnnnnnnnnnnnnnnnnnnnnnnnnnnnnnnnnnnnnnnnnnnnnnnnnnnnnnnnnnnnnnnnnnnnnnnnnnnnnnnnnnnnnnnnnnnnnnnnnnnnnnnnnnnnnnnnnnnnnnnnnnnnnnnnnnnnnnnnnnnnnnnnnnnnnnnnnnnnnnnnnnnnnnnnnnnnnnnnnnnnnnnnnnnnnnnnnnnnnnnnnnnnnnnnnnnnnnnnnnnnnnnnnnnnnnnnnnnnnnnnnnnnnnnnnnnnnnnnnnnnnnnnnnnnnnnnnnnnnnnnnnnnnnnnnnnnnnnnnnnnnnnnnnnnnnnnnnnnnnnnnnnnnnnnnnnnnnnnnnnnnnnnnnnnnnnnnnnnnnnnnnnnnnnnnnnnnnnnnnnnnnnnnnnnnnnnnnnnnnnnnnnnnnnnnnnnnnnnnnnnnnnnnnnnnnnnnnnnnnnnnnnnnnnnnnnnnnnnnnnnnnnnnnnnnnnnnnnnnnnnnnnnnnnnnnnnnnnnnnnnnnnnnnnnnnnnnnnnnnnnnnnnnnnnnnnnnnnnnnnnnnnnnnnnnnnnnnnnnnnnnnnnnnnnnnnnnnnnnnnnnnnnnnnnnnnnnnnnnnnnnnnnnnnnnnnnnnnnnnnnnnnnnnnnnnnnnnnnnnnnnnnnnnnnnnnnnnnnnnnnnnnnnnnnnnnnnnnnnnnnnnnnnnnnnnnnnnnnnnnnnnnnnnnnnnnnnnnnnnnnnnnnnnnnnnnnnnnnnnnnnnnnnnnnnnnnnnnnnnnnnnnnnnnnnnnnnnnnnnnnnnnnnnnnnnnnnnnnnnnnnnnnnnnnnnnnnnnnnnnnnnnnnnnnnnnnnnnnnnnnnnnnnnnnnnnnnnnnnnnnnnnnnnnnnnnnnnnnnnnnnnnnnnnnnnnnnnnnnnnnnnnnnnnnnnnnnnnnnnnnnnnnnnnnnnnnnnnnnnnnnnnnnnnnnnnnnnnnnnnnnnnnnnnnnnnnnnnnnnnnnnnnnnnnnnnnnnnnnnnnnnnnnnnnnnnnnnnnnnnnnnnnnnnnnnnnnnnnnnnnnnnnnnnnnnnnnnnnnnnnnnnnnnnnnnnnnnnnnnnnnnnnnnnnnnnnnnnnnnnnnnnnnnnnnnnnnnnnnnnnnnnnnnnnnnnnnnnnnnnnnnnnnnnnnnnnnnnnnnnnnnnnnnnnnnnnnnnnnnnnnnnnnnnnnnnnnnnnnnnnnnnnnnnnnnnnnnnnnnnnnnnnnnnnnnnnnnnnnnnnnnnnnnnnnnnnnnnnnnnnnnnnnnnnnnnnnnnnnnnnnnnnnnnnnnnnnnnnnnnnnnnnnnnnnnnnnnnnnnnnnnnnnnnnnnnnnnnnnnnnnnnnnnnnnnnnnnnnnnnnnnnnnnnnnnnnnnnnnnnnnnnnnnnnnnnnnnnnnnnnnnnnnnnnnnnnnnnnnnnnnnnnnnnnnnnnnnnnnnnnnnnnnnnnnnnnnnnnnnnnnnnnnnnnnnnnnnnnnnnnnnnnnnnnnnnnnnnnnnnnnnnnnnnnnnnnnnnnnnnnnnnnnnnnnnnnnnnnnnnnnnnnnnnnnnnnnnnnnnnnnnnnnnnnnnnnnnnnnnnnnnnnnnnnnnnnnnnnnnnnnnnnnnnnnnnnnnnnnnnnnnnnnnnnnnnnnnnnnnnnnnnnnnnnnnnnnnnnnnnnnnnnnnnnnnnnnnnnnnnnnnnnnnnnnnnnnnnnnnnnnnnnnnnnnnnnnnnnnnnnnnnnnnnnnnnnnnnnnnnnnnnnnnnnnnnnnnnnnnnnnnnnnnnnnnnnnnnnnnnnnnnnnnnnnnnnnnnnnnnnnnnnnnnnnnnnnnnnnnnnnnnnnnnnnnnnnnnnnnnnnnnnnnnnnnnnnnnnnnnnnnnnnnnnnnnnnnnnnnnnnnnnnnnnnnnnnnnnnnnnnnnnnnnnnnnnnnnnnnnnnnnnnnnnnnnnnnnnnnnnnnnnnnnnnnnnnnnnnnnnnnnnnnnnnnnnnnnnnnnnnnnnnnnnnnnnnnnnnnnnnnnnnnnnnnnnnnnnnnnnnnnnnnnnnnnnnnnnnnnnnnnnnnnnnnnnnnnnnnnnnnnnnnnnnnnnnnnnnnnnnnnnnnnnnnnnnnnnnnnnnnnnnnnnnnnnnnnnnnnnnnnnnnnnnnnnnnnnnnnnnnnnnnnnnnnnnnnnnnnnnnnnnnnnnnnnnnnnnnnnnnnnnnnnnnnnnnnnnnnnnnnnnnnnnnnnnnnnnnnnnnnnnnnnnnnnnnnnnnnnnnnnnnnnnnnnnnnnnnnnnnnnnnnnnnnnnnnnnnnnnnnnnnnnnnnnnnnnnnnnnnnnnnnnnnnnnnnnnnnnnnnnnnnnnnnnnnnnnnnnnnnnnnnnnnnnnnnnnnnnnnnnnnnnnnnnnnnnnnnnnnnnnnnnnnnnnnnnnnnnnnnnnnnnnnnnnnnnnnnnnnnnnnnnnnnnnnnnnnnnnnnnnnnnnnnnnnnnnnnnnnnnnnnnnnnnnnnnnnnnnnnnnnnnnnnnnnnnnnnnnnnnnnnnnnnnnnnnnnnnnnnnnnnnnnnnnnnnnnnnnnnnnnnnnnnnnnnnnnnnnnnnnnnnnnnnnnnnnnnnnnnnnnnnnnnnnnnnnnnnnnnnnnnnnnnnnnnnnnnnnnnnnnnnnnnnnnnnnnnnnnnnnnnnnnnnnnnnnnnnnnnnnnnnnnnnnnnnnnnnnnnnnnnnnnnnnnnnnnnnnnnnnnnnnnnnnnnnnnnnnnnnnnnnnnnnnnnnnnnnnnnnnnnnnnnnnnnnnnnnnnnnnnnnnnnnnnnnnnnnnnnnnnnnnnnnnnnnnnnnnnnnnnnnnnnnnnnnnnnnnnnnnnnnnnnnnnnnnnnnnnnnnnnnnnnnnnnnnnnnnnnnnnnnnnnnnnnnnnnnnnnnnnnnnnnnnnnnnnnnnnnnnnnnnnnnnnnnnnnnnnnnnnnnnnnnnnnnnnnnnnnnnnnnnnnnnnnnnnnnnnnnnnnnnnnnnnnnnnnnnnnnnnnnnnnnnnnnnnnnnnnnnnnnnnnnnnnnnnnnnnnnnnnnnnnnnnnnnnnnnnnnnnnnnnnnnnnnnnnnnnnnnnnnnnnnnnnnnnnnnnnnnnnnnnnnnnnnnnnnnnnnnnnnnnnnnnnnnnnnnnnnnnnnnnnnnnnnnnnnnnnnnnnnnnnnnnnnnnnnnnnnnnnnnnnnnnnnnnnnnnnnnnnnnnnnnnnnnnnnnnnnnnnnnnnnnnnnnnnnnnnnnnnnnnnnnnnnnnnnnnnnnnnnnnnnnnnnnnnnnnnnnnnnnnnnnnnnnnnnnnnnnnnnnnnnnnnnnnnnnnnnnnnnnnnnnnnnnnnnnnnnnnnnnnnnnnnnnnnnnnnnnnnnnnnnnnnnnnnnnnnnnnnnnnnnnnnnnnnnnnnnnnnnnnnnnnnnnnnnnnnnnnnnnnnnnnnnnnnnnnnnnnnnnnnnnnnnnnnnnnnnnnnnnnnnnnnnnnnnnnnnnnnnnnnnnnnnnnnnnnnnnnnnnnnnnnnnnnnnnnnnnnnnnnnnnnnnnnnnnnnnnnnnnnnnnnnnnnnnnnnnnnnnnnnnnnnnnnnnnnnnnnnnnnnnnnnnnnnnnnnnnnnnnnnnnnnnnnnnnnnnnnnnnnnnnnnnnnnnnnnnnnnnnnnnnnnnnnnnnnnnnnnnnnnnnnnnnnnnnnnnnnnnnnnnnnnnnnnnnnnnnnnnnnnnnnnnnnnnnnnnnnnnnnnnnnnnnnnnnnnnnnnnnnnnnnnnnnnnnnnnnnnnnnnnnnnnnnnnnnnnnnnnnnnnnnnnnnnnnnnnnnnnnnnnnnnnnnnnnnnnnnnnnnnnnnnnnnnnnnnnnnnnnnnnnnnnnnnnnnnnnnnnnnnnnnnnnnnnnnnnnnnnnnnnnnnnnnnnnnnnnnnnnnnnnnnnnnnnnnnnnnnnnnnnnnnnnnnnnnnnnnnnnnnnnnnnnnnnnnnnnnnnnnnnnnnnnnnnnnnnnnnnnnnnnnnnnnnnnnnnnnnnnnnnnnnnnnnnnnnnnnnnnnnnnnnnnnnnnnnnnnnnnnnnnnnnnnnnnnnnnnnnnnnnnnnnnnnnnnnnnnnnnnnnnnnnnnnnnnnnnnnnnnnnnnnnnnnnnnnnnnnnnnnnnnnnnnnnnnnnnnnnnnnnnnnnnnnnnnnnnnnnnnnnnnnnnnnnnnnnnnnnnnnnnnnnnnnnnnnnnnnnnnnnnnnnnnnnnnnnnnnnnnnnnnnnnnnnnnnnnnnnnnnnnnnnnnnnnnnnnnnnnnnnnnnnnnnnnnnnnnnnnnnnnnnnnnnnnnnnnnnnnnnnnnnnnnnnnnnnnnnnnnnnnnnnnnnnnnnnnnnnnnnnnnnnnnnnnnnnnnnnnnnnnnnnnnnnnnnnnnnnnnnnnnnnnnnnnnnnnnnnnnnnnnnnnnnnnnnnnnnnnnnnnnnnnnnnnnnnnnnnnnnnnnnnnnnnnnnnnnnnnnnnnnnnnnnnnnnnnnnnnnnnnnnnnnnnnnnnnnnnnnnnnnnnnnnnnnnnnnnnnnnnnnnnnnnnnnnnnnnnnnnnnnnnnnnnnnnnnnnnnnnnnnnnnnnnnnnnnnnnnnnnnnnnnnnnnnnnnnnnnnnnnnnnnnnnnnnnnnnnnnnnnnnnnnnnnnnnnnnnnnnnnnnnnnnnnnnnnnnnnnnnnnnnnnnnnnnnnnnnnnnnnnnnnnnnnnnnnnnnnnnnnnnnnnnnnnnnnnnnnnnnnnnnnnnnnnnnnnnnnnnnnnnnnnnnnnnnnnnnnnnnnnnnnnnnnnnnnnnnnnnnnnnnnnnnnnnnnnnnnnnnnnnnnnnnnnnnnnnnnnnnnnnnnnnnnnnnnnnnnnnnnnnnnnnnnnnnnnnnnnnnnnnnnnnnnnnnnnnnnnnnnnnnnnnnnnnnnnnnnnnnnnnnnnnnnnnnnnnnnnnnnnnnnnnnnnnnnnnnnnnnnnnnnnnnnnnnnnnnnnnnnnnnnnnnnnnnnnnnnnnnnnnnnnnnnnnnnnnnnnnnnnnnnnnnnnnnnnnnnnnnnnnnnnnnnnnnnnnnnnnnnnnnnnnnnnnnnnnnnnnnnnnnnnnnnnnnnnnnnnnnnnnnnnnnnnnnnnnnnnnnnnnnnnnnnnnnnnnnnnnnnnnnnnnnnnnnnnnnnnnnnnnnnnnnnnnnnnnnnnnnnnnnnnnnnnnnnnnnnnnnnnnnnnnnnnnnnnnnnnnnnnnnnnnnnnnnnnnnnnnnnnnnnnnnnnnnnnnnnnnnnnnnnnnnnnnnnnnnnnnnnnnnnnnnnnnnnnnnnnnnnnnnnnnnnnnnnnnnnnnnnnnnnnnnnnnnnnnnnnnnnnnnnnnnnnnnnnnnnnnnnnnnnnnnnnnnnnnnnnnnnnnnnnnnnnnnnnnnnnnnnnnnnnnnnnnnnnnnnnnnnnnnnnnnnnnnnnnnnnnnnnnnnnnnnnnnnnnnnnnnnnnnnnnnnnnnnnnnnnnnnnnnnnnnnnnnnnnnnnnnnnnnnnnnnnnnnnnnnnnnnnnnnnnnnnnnnnnnnnnnnnnnnnnnnnnnnnnnnnnnnnnnnnnnnnnnnnnnnnnnnnnnnnnnnnnnnnnnnnnnnnnnnnnnnnnnnnnnnnnnnnnnnnnnnnnnnnnnnnnnnnnnnnnnnnnnnnnnnnnnnnnnnnnnnnnnnnnnnnnnnnnnnnnnnnnnnnnnnnnnnnnnnnnnnnnnnnnnnnnnnnnnnnnnnnnnnnnnnnnnnnnnnnnnnnnnnnnnnnnnnnnnnnnnnnnnnnnnnnnnnnnnnnnnnnnnnnnnnnnnnnnnnnnnnnnnnnnnnnnnnnnnnnnnnnnnnnnnnnnnnnnnnnnnnnnnnnnnnnnnnnnnnnnnnnnnnnnnnnnnnnnnnnnnnnnnnnnnnnnnnnnnnnnnnnnnnnnnnnnnnnnnnnnnnnnnnnnnnnnnnnnnnnnnnnnnnnnnnnnnnnnnnnnnnnnnnnnnnnnnnnnnnnnnnnnnnnnnnnnnnnnnnnnnnnnnnnnnnnnnnnnnnnnnnnnnnnnnnnnnnnnnnnnnnnnnnnnnnnnnnnnnnnnnnnnnnnnnnnnnnnnnnnnnnnnnnnnnnnnnnnnnnnnnnnnnnnnnnnnnnnnnnnnnnnnnnnnnnnnnnnnnnnnnnnnnnnnnnnnnnnnnnnnnnnnnnnnnnnnnnnnnnnnnnnnnnnnnnnnnnnnnnnnnnnnnnnnnnnnnnnnnnnnnnnnnnnnnnnnnnnnnnnnnnnnnnnnnnnnnnnnnnnnnnnnnnnnnnnnnnnnnnnnnnnnnnnnnnnnnnnnnnnnnnnnnnnnnnnnnnnnnnnnnnnnnnnnnnnnnnnnnnnnnnnnnnnnnnnnnnnnnnnnnnnnnnnnnnnnnnnnnnnnnnnnnnnnnnnnnnnnnnnnnnnnnnnnnnnnnnnnnnnnnnnnnnnnnnnnnnnnnnnnnnnnnnnnnnnnnnnnnnnnnnnnnnnnnnnnnnnnnnnnnnnnnnnnnnnnnnnnnnnnnnnnnnnnnnnnnnnnnnnnnnnnnnnnnnnnnnnnnnnnnnnnnnnnnnnnnnnnnnnnnnnnnnnnnnnnnnnnnnnnnnnnnnnnnnnnnnnnnnnnnnnnnnnnnnnnnnnnnnnnnnnnnnnnnnnnnnnnnnnnnnnnnnnnnnnnnnnnnnnnnnnnnnnnnnnnnnnnnnnnnnnnnnnnnnnnnnnnnnnnnnnnnnnnnnnnnnnnnnnnnnnnnnnnnnnnnnnnnnnnnnnnnnnnnnnnnnnnnnnnnnnnnnnnnnnnnnnnnnnnnnnnnnnnnnnnnnnnnnnnnnnnnnnnnnnnnnnnnnnnnnnnnnnnnnnnnnnnnnnnnnnnnnnnnnnnnnnnnnnnnnnnnnnnnnnnnnnnnnnnnnnnnnnnnnnnnnnnnnnnnnnnnnnnnnnnnnnnnnnnnnnnnnnnnnnnnnnnnnnnnnnnnnnnnnnnnnnnnnnnnnnnnnnnnnnnnnnnnnnnnnnnnnnnnnnnnnnnnnnnnnnnnnnnnnnnnnnnnnnnnnnnnnnnnnnnnnnnnnnnnnnnnnnnnnnnnnnnnnnnnnnnnnnnnnnnnnnnnnnnnnnnnnnnnnnnnnnnnnnnnnnnnnnnnnnnnnnnnnnnnnnnnnnnnnnnnnnnnnnnnnnnnnnnnnnnnnnnnnnnnnnnnnnnnnnnnnnnnnnnnnnnnnnnnnnnnnnnnnnnnnnnnnnnnnnnnnnnnnnnnnnnnnnnnnnnnnnnnnnnnnnnnnnnnnnnnnnnnnnnnnnnnnnnnnnnnnnnnnnnnnnnnnnnnnnnnnnnnnnnnnnnnnnnnnnnnnnnnnnnnnnnnnnnnnnnnnnnnnnnnnnnnnnnnnnnnnnnnnnnnnnnnnnnnnnnnnnnnnnnnnnnnnnnnnnnnnnnnnnnnnnnnnnnnnnnnnnnnnnnnnnnnnnnnnnnnnnnnnnnnnnnnnnnnnnnnnnnnnnnnnnnnnnnnnnnnnnnnnnnnnnnnnnnnnnnnnnnnnnnnnnnnnnnnnnnnnnnnnnnnnnnnnnnnnnnnnnnnnnnnnnnnnnnnnnnnnnnnnnnnnnnnnnnnnnnnnnnnnnnnnnnnnnnnnnnnnnnnnnnnnnnnnnnnnnnnnnnnnnnnnnnnnnnnnnnnnnnnnnnnnnnnnnnnnnnnnnnnnnnnnnnnnnnnnnnnnnnnnnnnnnnnnnnnnnnnnnnnnnnnnnnnnnnnnnnnnnnnnnnnnnnnnnnnnnnnnnnnnnnnnnnnnnnnnnnnnnnnnnnnnnnnnnnnnnnnnnnnnnnnnnnnnnnnnnnnnnnnnnnnnnnnnnnnnnnnnnnnnnnnnnnnnnnnnnnnnnnnnnnnnnnnnnnnnnnnnnnnnnnnnnnnnnnnnnnnnnnnnnnnnnnnnnnnnnnnnnnnnnnnnnnnnnnnnnnnnnnnnnnnnnnnnnnnnnnnnnnnnnnnnnnnnnnnnnnnnnnnnnnnnnnnnnnnnnnnnnnnnnnnnnnnnnnnnnnnnnnnnnnnnnnnnnnnnnnnnnnnnnnnnnnnnnnnnnnnnnnnnnnnnnnnnnnnnnnnnnnnnnnnnnnnnnnnnnnnnnnnnnnnnnnnnnnnnnnnnnnnnnnnnnnnnnnnnnnnnnnnnnnnnnnnnnnnnnnnnnnnnnnnnnnnnnnnnnnnnnnnnnnnnnnnnnnnnnnnnnnnnnnnnnnnnnnnnnnnnnnnnnnnnnnnnnnnnnnnnnnnnnnnnnnnnnnnnnnnnnnnnnnnnnnnnnnnnnnnnnnnnnnnnnnnnnnnnnnnnnnnnnnnnnnnnnnnnnnnnnnnnnnnnnnnnnnnnnnnnnnnnnnnnnnnnnnnnnnnnnnnnnnnnnnnnnnnnnnnnnnnnnnnnnnnnnnnnnnnnnnnnnnnnnnnnnnnnnnnnnnnnnnnnnnnnnnnnnnnnnnnnnnnnnnnnnnnnnnnnnnnnnnnnnnnnnnnnnnnnnnnnnnnnnnnnnnnnnnnnnnnnnnnnnnnnnnnnnnnnnnnnnnnnnnnnnnnnnnnnnnnnnnnnnnnnnnnnnnnnnnnnnnnnnnnnnnnnnnnnnnnnnnnnnnnnnnnnnnnnnnnnnnnnnnnnnnnnnnnnnnnnnnnnnnnnnnnnnnnnnnnnnnnnnnnnnnnnnnnnnnnnnnnnnnnnnnnnnnnnnnnnnnnnnnnnnnnnnnnnnnnnnnnnnnnnnnnnnnnnnnnnnnnnnnnnnnnnnnnnnnnnnnnnnnnnnnnnnnnnnnnnnnnnnnnnnnnnnnnnnnnnnnnnnnnnnnnnnnnnnnnnnnnnnnnnnnnnnnnnnnnnnnnnnnnnnnnnnnnnnnnnnnnnnnnnnnnnnnnnnnnnnnnnnnnnnnnnnnnnnnnnnnnnnnnnnnnnnnnnnnnnnnnnnnnnnnnnnnnnnnnnnnnnnnnnnnnnnnnnnnnnnnnnnnnnnnnnnnnnnnnnnnnnnnnnnnnnnnnnnnnnnnnnnnnnnnnnnnnnnnnnnnnnnnnnnnnnnnnnnnnnnnnnnnnnnnnnnnnnnnnnnnnnnnnnnnnnnnnnnnnnnnnnnnnnnnnnnnnnnnnnnnnnnnnnnnnnnnnnnnnnnnnnnnnnnnnnnnnnnnnnnnnnnnnnnnnnnnnnnnnnnnnnnnnnnnnnnnnnnnnnnnnnnnnnnnnnnnnnnnnnnnnnnnnnnnnnnnnnnnnnnnnnnnnnnnnnnnnnnnnnnnnnnnnnnnnnnnnnnnnnnnnnnnnnnnnnnnnnnnnnnnnnnnnnnnnnnnnnnnnnnnnnnnnnnnnnnnnnnnnnnnnnnnnnnnnnnnnnnnnnnnnnnnnnnnnnnnnnnnnnnnnnnnnnnnnnnnnnnnnnnnnnnnnnnnnnnnnnnnnnnnnnnnnnnnnnnnnnnnnnnnnnnnnnnnnnnnnnnnnnnnnnnnnnnnnnnnnnnnnnnnnnnnnnnnnnnnnnnnnnnnnnnnnnnnnnnnnnnnnnnnnnnnnnnnnnnnnnnnnnnnnnnnnnnnnnnnnnnnnnnnnnnnnnnnnnnnnnnnnnnnnnnnnnnnnnnnnnnnnnnnnnnnnnnnnnnnnnnnnnnnnnnnnnnnnnnnnnnnnnnnnnnnnnnnnnnnnnnnnnnnnnnnnnnnnnnnnnnnnnnnnnnnnnnnnnnnnnnnnnnnnnnnnnnnnnnnnnnnnnnnnnnnnnnnnnnnnnnnnnnnnnnnnnnnnnnnnnnnnnnnnnnnnnnnnnnnnnnnnnnnnnnnnnnnnnnnnnnnnnnnnnnnnnnnnnnnnnnnnnnnnnnnnnnnnnnnnnnnnnnnnnnnnnnnnnnnnnnnnnnnnnnnnnnnnnnnnnnnnnnnnnnnnnnnnnnnnnnnnnnnnnnnnnnnnnnnnnnnnnnnnnnnnnnnnnnnnnnnnnnnnnnnnnnnnnnnnnnnnnnnnnnnnnnnnnnnnnnnnnnnnnnnnnnnnnnnnnnnnnnnnnnnnnnnnnnnnnnnnnnnnnnnnnnnnnnnnnnnnnnnnnnnnnnnnnnnnnnnnnnnnnnnnnnnnnnnnnnnnnnnnnnnnnnnnnnnnnnnnnnnnnnnnnnnnnnnnnnnnnnnnnnnnnnnnnnnnnnnnnnnnnnnnnnnnnnnnnnnnnnnnnnnnnnnnnnnnnnnnnnnnnnnnnnnnnnnnnnnnnnnnnnnnnnnnnnnnnnnnnnnnnnnnnnnnnnnnnnnnnnnnnnnnnnnnnnnnnnnnnnnnnnnnnnnnnnnnnnnnnnnnnnnnnnnnnnnnnnnnnnnnnnnnnnnnnnnnnnnnnnnnnnnnnnnnnnnnnnnnnnnnnnnnnnnnnnnnnnnnnnnnnnnnnnnnnnnnnnnnnnnnnnnnnnnnnnnnnnnnnnnnnnnnnnnnnnnnnnnnnnnnnnnnnnnnnnnnnnnnnnnnnnnnnnnnnnnnnnnnnnnnnnnnnnnnnnnnnnnnnnnnnnnnnnnnnnnnnnnnnnnnnnnnnnnnnnnnnnnnnnnnnnnnnnnnnnnnnnnnnnnnnnnnnnnnnnnnnnnnnnnnnnnnnnnnnnnnnnnnnnnnnnnnnnnnnnnnnnnnnnnnnnnnnnnnnnnnnnnnnnnnnnnnnnnnnnnnnnnnnnnnnnnnnnnnnnnnnnnnnnnnnnnnnnnnnnnnnnnnnnnnnnnnnnnnnnnnnnnnnnnnnnnnnnnnnnnnnnnnnnnnnnnnnnnnnnnnnnnnnnnnnnnnnnnnnnnnnnnnnnnnnnnnnnnnnnnnnnnnnnnnnnnnnnnnnnnnnnnnnnnnnnnnnnnnnnnnnnnnnnnnnnnnnnnnnnnnnnnnnnnnnnnnnnnnnnnnnnnnnnnnnnnnnnnnnnnnnnnnnnnnnnnnnnnnnnnnnnnnnnnnnnnnnnnnnnnnnnnnnnnnnnnnnnnnnnnnnnnnnnnnnnnnnnnnnnnnnnnnnnnnnnnnnnnnnnnnnnnnnnnnnnnnnnnnnnnnnnnnnnnnnnnnnnnnnnnnnnnnnnnnnnnnnnnnnnnnnnnnnnnnnnnnnnnnnnnnnnnnnnnnnnnnnnnnnnnnnnnnnnnnnnnnnnnnnnnnnnnnnnnnnnnnnnnnnnnnnnnnnnnnnnnnnnnnnnnnnnnnnnnnnnnnnnnnnnnnnnnnnnnnnnnnnnnnnnnnnnnnnnnnnnnnnnnnnnnnnnnnnnnnnnnnnnnnnnnnnnnnnnnnnnnnnnnnnnnnnnnnnnnnnnnnnnnnnnnnnnnnnnnnnnnnnnnnnnnnnnnnnnnnnnnnnnnnnnnnnnnnnnnnnnnnnnnnnnnnnnnnnnnnnnnnnnnnnnnnnnnnnnnnnnnnnnnnnnnnnnnnnnnnnnnnnnnnnnnnnnnnnnnnnnnnnnnnnnnnnnnnnnnnnnnnnnnnnnnnnnnnnnnnnnnnnnnnnnnnnnnnnnnnnnnnnnnnnnnnnnnnnnnnnnnnnnnnnnnnnnnnnnnnnnnnnnnnnnnnnnnnnnnnnnnnnnnnnnnnnnnnnnnnnnnnnnnnnnnnnnnnnnnnnnnnnnnnnnnnnnnnnnnnnnnnnnnnnnnnnnnnnnnnnnnnnnnnnnnnnnnnnnnnnnnnnnnnnnnnnnnnnnnnnnnnnnnnnnnnnnnnnnnnnnnnnnnnnnnnnnnnnnnnnnnnnnnnnnnnnnnnnnnnnnnnnnnnnnnnnnnnnnnnnnnnnnnnnnnnnnnnnnnnnnnnnnnnnnnnnnnnnnnnnnnnnnnnnnnnnnnnnnnnnnnnnnnnnnnnnnnnnnnnnnnnnnnnnnnnnnnnnnnnnnnnnnnnnnnnnnnnnnnnnnnnnnnnnnnnnnnnnnnnnnnnnnnnnnnnnnnnnnnnnnnnnnnnnnnnnnnnnnnnnnnnnnnnnnnnnnnnnnnnnnnnnnnnnnnnnnnnnnnnnnnnnnnnnnnnnnnnnnnnnnnnnnnnnnnnnnnnnnnnnnnnnnnnnnnnnnnnnnnnnnnnnnnnnnnnnnnnnnnnnnnnnnnnnnnnnnnnnnnnnnnnnnnnnnnnnnnnnnnnnnnnnnnnnnnnnnnnnnnnnnnnnnnnnnnnnnnnnnnnnnnnnnnnnnnnnnnnnnnnnnnnnnnnnnnnnnnnnnnnnnnnnnnnnnnnnnnnnnnnnnnnnnnnnnnnnnnnnnnnnnnnnnnnnnnnnnnnnnnnnnnnnnnnnnnnnnnnnnnnnnnnnnnnnnnnnnnnnnnnnnnnnnnnnnnnnnnnnnnnnnnnnnnnnnnnnnnnnnnnnnnnnnnnnnnnnnnnnnnnnnnnnnnnnnnnnnnnnnnnnnnnnnnnnnnnnnnnnnnnnnnnnnnnnnnnnnnnnnnnnnnnnnnnnnnnnnnnnnnnnnnnnnnnnnnnnnnnnnnnnnnnnnnnnnnnnnnnnnnnnnnnnnnnnnnnnnnnnnnnnnnnnnnnnnnnnnnnnnnnnnnnnnnnnnnnnnnnnnnnnnnnnnnnnnnnnnnnnnnnnnnnnnnnnnnnnnnnnnnnnnnnnnnnnnnnnnnnnnnnnnnnnnnnnnnnnnnnnnnnnnnnnnnnnnnnnnnnnnnnnnnnnnnnnnnnnnnnnnnnnnnnnnnnnnnnnnnnnnnnnnnnnnnnnnnnnnnnnnnnnnnnnnnnnnnnnnnnnnnnnnnnnnnnnnnnnnnnnnnnnnnnnnnnnnnnnnnnnnnnnnnnnnnnnnnnnnnnnnnnnnnnnnnnnnnnnnnnnnnnnnnnnnnnnnnnnnnnnnnnnnnnnnnnnnnnnnnnnnnnnnnnnnnnnnnnnnnnnnnnnnnnnnnnnnnnnnnnnnnnnnnnnnnnnnnnnnnnnnnnnnnnnnnnnnnnnnnnnnnnnnnnnnnnnnnnnnnnnnnnnnnnnnnnnnnnnnnnnnnnnnnnnnnnnnnnnnnnnnnnnnnnnnnnnnnnnnnnnnnnnnnnnnnnnnnnnnnnnnnnnnnnnnnnnnnnnnnnnnnnnnnnnnnnnnnnnnnnnnnnnnnnnnnnnnnnnnnnnnnnnnnnnnnnnnnnnnnnnnnnnnnnnnnnnnnnnnnnnnnnnnnnnnnnnnnnnnnnnnnnnnnnnnnnnnnnnnnnnnnnnnnnnnnnnnnnnnnnnnnnnnnnnnnnnnnnnnnnnnnnnnnnnnnnnnnnnnnnnnnnnnnnnnnnnnnnnnnnnnnnnnnnnnnnnnnnnnnnnnnnnnnnnnnnnnnnnnnnnnnnnnnnnnnnnnnnnnnnnnnnnnnnnnnnnnnnnnnnnnnnnnnnnnnnnnnnnnnnnnnnnnnnnnnnnnnnnnnnnnnnnnnnnnnnnnnnnnnnnnnnnnnnnnnnnnnnnnnnnnnnnnnnnnnnnnnnnnnnnnnnnnnnnnnnnnnnnnnnnnnnnnnnnnnnnnnnnnnnnnnnnnnnnnnnnnnnnnnnnnnnnnnnnnnnnnnnnnnnnnnnnnnnnnnnnnnnnnnnnnnnnnnnnnnnnnnnnnnnnnnnnnnnnnnnnnnnnnnnnnnnnnnnnnnnnnnnnnnnnnnnnnnnnnnnnnnnnnnnnnnnnnnnnnnnnnnnnnnnnnnnnnnnnnnnnnnnnnnnnnnnnnnnnnnnnnnnnnnnnnnnnnnnnnnnnnnnnnnnnnnnnnnnnnnnnnnnnnnnnnnnnnnnnnnnnnnnnnnnnnnnnnnnnnnnnnnnnnnnnnnnnnnnnnnnnnnnnnnnnnnnnnnnnnnnnnnnnnnnnnnnnnnnnnnnnnnnnnnnnnnnnnnnnnnnnnnnnnnnnnnnnnnnnnnnnnnnnnnnnnnnnnnnnnnnnnnnnnnnnnnnnnnnnnnnnnnnnnnnnnnnnnnnnnnnnnnnnnnnnnnnnnnnnnnnnnnnnnnnnnnnnnnnnnnnnnnnnnnnnnnnnnnnnnnnnnnnnnnnnnnnnnnnnnnnnnnnnnnnnnnnnnnnnnnnnnnnnnnnnnnnnnnnnnnnnnnnnnnnnnnnnnnnnnnnnnnnnnnnnnnnnnnnnnnnnnnnnnnnnnnnnnnnnnnnnnnnnnnnnnnnnnnnnnnnnnnnnnnnnnnnnnnnnnnnnnnnnnnnnnnnnnnnnnnnnnnnnnnnnnnnnnnnnnnnnnnnnnnnnnnnnnnnnnnnnnnnnnnnnnnnnnnnnnnnnnnnnnnnnnnnnnnnnnnnnnnnnnnnnnnnnnnnnnnnnnnnnnnnnnnnnnnnnnnnnnnnnnnnnnnnnnnnnnnnnnnnnnnnnnnnnnnnnnnnnnnnnnnnnnnnnnnnnnnnnnnnnnnnnnnnnnnnnnnnnnnnnnnnnnnnnnnnnnnnnnnnnnnnnnnnnnnnnnnnnnnnnnnnnnnnnnnnnnnnnnnnnnnnnnnnnnnnnnnnnnnnnnnnnnnnnnnnnnnnnnnnnnnnnnnnnnnnnnnnnnnnnnnnnnnnnnnnnnnnnnnnnnnnnnnnnnnnnnnnnnnnnnnnnnnnnnnnnnnnnnnnnnnnnnnnnnnnnnnnnnnnnnnnnnnnnnnnnnnnnnnnnnnnnnnnnnnnnnnnnnnnnnnnnnnnnnnnnnnnnnnnnnnnnnnnnnnnnnnnnnnnnnnnnnnnnnnnnnnnnnnnnnnnnnnnnnnnnnnnnnnnnnnnnnnnnnnnnnnnnnnnnnnnnnnnnnnnnnnnnnnnnnnnnnnnnnnnnnnnnnnnnnnnnnnnnnnnnnnnnnnnnnnnnnnnnnnnnnnnnnnnnnnnnnnnnnnnnnnnnnnnnnnnnnnnnnnnnnnnnnnnnnnnnnnnnnnnnnnnnnnnnnnnnnnnnnnnnnnnnnnnnnnnnnnnnnnnnnnnnnnnnnnnnnnnnnnnnnnnnnnnnnnnnnnnnnnnnnnnnnnnnnnnnnnnnnnnnnnnnnnnnnnnnnnnnnnnnnnnnnnnnnnnnnnnnnnnnnnnnnnnnnnnnnnnnnnnnnnnnnnnnnnnnnnnnnnnnnnnnnnnnnnnnnnnnnnnnnnnnnnnnnnnnnnnnnnnnnnnnnnnnnnnnnnnnnnnnnnnnnnnnnnnnnnnnnnnnnnnnnnnnnnnnnnnnnnnnnnnnnnnnnnnnnnnnnnnnnnnnnnnnnnnnnnnnnnnnnnnnnnnnnnnnnnnnnnnnnnnnnnnnnnnnnnnnnnnnnnnnnnnnnnnnnnnnnnnnnnnnnnnnnnnnnnnnnnnnnnnnnnnnnnnnnnnnnnnnnnnnnnnnnnnnnnnnnnnnnnnnnnnnnnnnnnnnnnnnnnnnnnnnnnnnnnnnnnnnnnnnnnnnnnnnnnnnnnnnnnnnnnnnnnnnnnnnnnnnnnnnnnnnnnnnnnnnnnnnnnnnnnnnnnnnnnnnnnnnnnnnnnnnnnnnnnnnnnnnnnnnnnnnnnnnnnnnnnnnnnnnnnnnnnnnnnnnnnnnnnnnnnnnnnnnnnnnnnnnnnnnnnnnnnnnnnnnnnnnnnnnnnnnnnnnnnnnnnnnnnnnnnnnnnnnnnnnnnnnnnnnnnnnnnnnnnnnnnnnnnnnnnnnnnnnnnnnnnnnnnnnnnnnnnnnnnnnnnnnnnnnnnnnnnnnnnnnnnnnnnnnnnnnnnnnnnnnnnnnnnnnnnnnnnnnnnnnnnnnnnnnnnnnnnnnnnnnnnnnnnnnnnnnnnnnnnnnnnnnnnnnnnnnnnnnnnnnnnnnnnnnnnnnnnnnnnnnnnnnnnnnnnnnnnnnnnnnnnnnnnnnnnnnnnnnnnnnnnnnnnnnnnnnnnnnnnnnnnnnnnnnnnnnnnnnnnnnnnnnnnnnnnnnnnnnnnnnnnnnnnnnnnnnnnnnnnnnnnnnnnnnnnnnnnnnnnnnnnnnnnnnnnnnnnnnnnnnnnnnnnnnnnnnnnnnnnnnnnnnnnnnnnnnnnnnnnnnnnnnnnnnnnnnnnnnnnnnnnnnnnnnnnnnnnnnnnnnnnnnnnnnnnnnnnnnnnnnnnnnnnnnnnnnnnnnnnnnnnnnnnnnnnnnnnnnnnnnnnnnnnnnnnnnnnnnnnnnnnnnnnnnnnnnnnnnnnnnnnnnnnnnnnnnnnnnnnnnnnnnnnnnnnnnnnnnnnnnnnnnnnnnnnnnnnnnnnnnnnnnnnnnnnnnnnnnnnnnnnnnnnnnnnnnnnnnnnnnnnnnnnnnnnnnnnnnnnnnnnnnnnnnnnnnnnnnnnnnnnnnnnnnnnnnnnnnnnnnnnnnnnnnnnnnnnnnnnnnnnnnnnnnnnnnnnnnnnnnnnnnnnnnnnnnnnnnnnnnnnnnnnnnnnnnnnnnnnnnnnnnnnnnnnnnnnnnnnnnnnnnnnnnnnnnnnnnnnnnnnnnnnnnnnnnnnnnnnnnnnnnnnnnnnnnnnnnnnnnnnnnnnnnnnnnnnnnnnnnnnnnnnnnnnnnnnnnnnnnnnnnnnnnnnnnnnnnnnnnnnnnnnnnnnnnnnnnnnnnnnnnnnnnnnnnnnnnnnnnnnnnnnnnnnnnnnnnnnnnnnnnnnnnnnnnnnnnnnnnnnnnnnnnnnnnnnnnnnnnnnnnnnnnnnnnnnnnnnnnnnnnnnnnnnnnnnnnnnnnnnnnnnnnnnnnnnnnnnnnnnnnnnnnnnnnnnnnnnnnnnnnnnnnnnnnnnnnnnnnnnnnnnnnnnnnnnnnnnnnnnnnnnnnnnnnnnnnnnnnnnnnnnnnnnnnnnnnnnnnnnnnnnnnnnnnnnnnnnnnnnnnnnnnnnnnnnnnnnnnnnnnnnnnnnnnnnnnnnnnnnnnnnnnnnnnnnnnnnnnnnnnnnnnnnnnnnnnnnnnnnnnnnnnnnnnnnnnnnnnnnnnnnnnnnnnnnnnnnnnnnnnnnnnnnnnnnnnnnnnnnnnnnnnnnnnnnnnnnnnnnnnnnnnnnnnnnnnnnnnnnnnnnnnnnnnnnnnnnnnnnnnnnnnnnnnnnnnnnnnnnnnnnnnnnnnnnnnnnnnnnnnnnnnnnnnnnnnnnnnnnnnnnnnnnnnnnnnnnnnnnnnnnnnnnnnnnnnnnnnnnnnnnnnnnnnnnnnnnnnnnnnnnnnnnnnnnnnnnnnnnnnnnnnnnnnnnnnnnnnnnnnnnnnnnnnnnnnnnnnnnnnnnnnnnnnnnnnnnnnnnnnnnnnnnnnnnnnnnnnnnnnnnnnnnnnnnnnnnnnnnnnnnnnnnnnnnnnnnnnnnnnnnnnnnnnnnnnnnnnnnnnnnnnnnnnnnnnnnnnnnnnnnnnnnnnnnnnnnnnnnnnnnnnnnnnnnnnnnnnnnnnnnnnnnnnnnnnnnnnnnnnnnnnnnnnnnnnnnnnnnnnnnnnnnnnnnnnnnnnnnnnnnnnnnnnnnnnnnnnnnnnnnnnnnnnnnnnnnnnnnnnnnnnnnnnnnnnnnnnnnnnnnnnnnnnnnnnnnnnnnnnnnnnnnnnnnnnnnnnnnnnnnnnnnnnnnnnnnnnnnnnnnnnnnnnnnnnnnnnnnnnnnnnnnnnnnnnnnnnnnnnnnnnnnnnnnnnnnnnnnnnnnnnnnnnnnnnnnnnnnnnnnnnnnnnnnnnnnnnnnnnnnnnnnnnnnnnnnnnnnnnnnnnnnnnnnnnnnnnnnnnnnnnnnnnnnnnnnnnnnnnnnnnnnnnnnnnnnnnnnnnnnnnnnnnnnnnnnnnnnnnnnnnnnnnnnnnnnnnnnnnnnnnnnnnnnnnnnnnnnnnnnnnnnnnnnnnnnnnnnnnnnnnnnnnnnnnnnnnnnnnnnnnnnnnnnnnnnnnnnnnnnnnnnnnnnnnnnnnnnnnnnnnnnnnnnnnnnnnnnnnnnnnnnnnnnnnnnnnnnnnnnnnnnnnnnnnnnnnnnnnnnnnnnnnnnnnnnnnnnnnnnnnnnnnnnnnnnnnnnnnnnnnnnnnnnnnnnnnnnnnnnnnnnnnnnnnnnnnnnnnnnnnnnnnnnnnnnnnnnnnnnnnnnnnnnnnnnnnnnnnnnnnnnnnnnnnnnnnnnnnnnnnnnnnnnnnnnnnnnnnnnnnnnnnnnnnnnnnnnnnnnnnnnnnnnnnnnnnnnnnnnnnnnnnnnnnnnnnnnnnnnnnnnnnnnnnnnnnnnnnnnnnnnnnnnnnnnnnnnnnnnnnnnnnnnnnnnnnnnnnnnnnnnnnnnnnnnnnnnnnnnnnnnnnnnnnnnnnnnnnnnnnnnnnnnnnnnnnnnnnnnnnnnnnnnnnnnnnnnnnnnnnnnnnnnnnnnnnnnnnnnnnnnnnnnnnnnnnnnnnnnnnnnnnnnnnnnnnnnnnnnnnnnnnnnnnnnnnnnnnnnnnnnnnnnnnnnnnnnnnnnnnnnnnnnnnnnnnnnnnnnnnnnnnnnnnnnnnnnnnnnnnnnnnnnnnnnnnnnnnnnnnnnnnnnnnnnnnnnnnnnnnnnnnnnnnnnnnnnnnnnnnnnnnnnnnnnnnnnnnnnnnnnnnnnnnnnnnnnnnnnnnnnnnnnnnnnnnnnnnnnnnnnnnnnnnnnnnnnnnnnnnnnnnnnnnnnnnnnnnnnnnnnnnnnnnnnnnnnnnnnnnnnnnnnnnnnnnnnnnnnnnnnnnnnnnnnnnnnnnnnnnnnnnnnnnnnnnnnnnnnnnnnnnnnnnnnnnnnnnnnnnnnnnnnnnnnnnnnnnnnnnnnnnnnnnnnnnnnnnnnnnnnnnnnnnnnnnnnnnnnnnnnnnnnnnnnnnnnnnnnnnnnnnnnnnnnnnnnnnnnnnnnnnnnnnnnnnnnnnnnnnnnnnnnnnnnnnnnnnnnnnnnnnnnnnnnnnnnnnnnnnnnnnnnnnnnnnnnnnnnnnnnnnnnnnnnnnnnnnnnnnnnnnnnnnnnnnnnnnnnnnnnnnnnnnnnnnnnnnnnnnnnnnnnnnnnnnnnnnnnnnnnnnnnnnnnnnnnnnnnnnnnnnnnnnnnnnnnnnnnnnnnnnnnnnnnnnnnnnnnnnnnnnnnnnnnnnnnnnnnnnnnnnnnnnnnnnnnnnnnnnnnnnnnnnnnnnnnnnnnnnnnnnnnnnnnnnnnnnnnnnnnnnnnnnnnnnnnnnnnnnnnnnnnnnnnnnnnnnnnnnnnnnnnnnnnnnnnnnnnnnnnnnnnnnnnnnnnnnnnnnnnnnnnnnnnnnnnnnnnnnnnnnnnnnnnnnnnnnnnnnnnnnnnnnnnnnnnnnnnnnnnnnnnnnnnnnnnnnnnnnnnnnnnnnnnnnnnnnnnnnnnnnnnnnnnnnnnnnnnnnnnnnnnnnnnnnnnnnnnnnnnnnnnnnnnnnnnnnnnnnnnnnnnnnnnnnnnnnnnnnnnnnnnnnnnnnnnnnnnnnnnnnnnnnnnnnnnnnnnnnnnnnnnnnnnnnnnnnnnnnnnnnnnnnnnnnnnnnnnnnnnnnnnnnnnnnnnnnnnnnnnnnnnnnnnnnnnnnnnnnnnnnnnnnnnnnnnnnnnnnnnnnnnnnnnnnnnnnnnnnnnnnnnnnnnnnnnnnnnnnnnnnnnnnnnnnnnnnnnnnnnnnnnnnnnnnnnnnnnnnnnnnnnnnnnnnnnnnnnnnnnnnnnnnnnnnnnnnnnnnnnnnnnnnnnnnnnnnnnnnnnnnnnnnnnnnnnnnnnnnnnnnnnnnnnnnnnnnnnnnnnnnnnnnnnnnnnnnnnnnnnnnnnnnnnnnnnnnnnnnnnnnnnnnnnnnnnnnnnnnnnnnnnnnnnnnnnnnnnnnnnnnnnnnnnnnnnnnnnnnnnnnnnnnnnnnnnnnnnnnnnnnnnnnnnnnnnnnnnnnnnnnnnnnnnnnnnnnnnnnnnnnnnnnnnnnnnnnnnnnnnnnnnnnnnnnnnnnnnnnnnnnnnnnnnnnnnnnnnnnnnnnnnnnnnnnnnnnnnnnnnnnnnnnnnnnnnnnnnnnnnnnnnnnnnnnnnnnnnnnnnnnnnnnnnnnnnnnnnnnnnnnnnnnnnnnnnnnnnnnnnnnnnnnnnnnnnnnnnnnnnnnnnnnnnnnnnnnnnnnnnnnnnnnnnnnnnnnnnnnnnnnnnnnnnnnnnnnnnnnnnnnnnnnnnnnnnnnnnnnnnnnnnnnnnnnnnnnnnnnnnnnnnnnnnnnnnnnnnnnnnnnnnnnnnnnnnnnnnnnnnnnnnnnnnnnnnnnnnnnnnnnnnnnnnnnnnnnnnnnnnnnnnnnnnnnnnnnnnnnnnnnnnnnnnnnnnnnnnnnnnnnnnnnnnnnnnnnnnnnnnnnnnnnnnnnnnnnnnnnnnnnnnnnnnnnnnnnnnnnnnnnnnnnnnnnnnnnnnnnnnnnnnnnnnnnnnnnnnnnnnnnnnnnnnnnnnnnnnnnnnnnnnnnnnnnnnnnnnnnnnnnnnnnnnnnnnnnnnnnnnnnnnnnnnnnnnnnnnnnnnnnnnnnnnnnnnnnnnnnnnnnnnnnnnnnnnnnnnnnnnnnnnnnnnnnnnnnnnnnnnnnnnnnnnnnnnnnnnnnnnnnnnnnnnnnnnnnnnnnnnnnnnnnnnnnnnnnnnnnnnnnnnnnnnnnnnnnnnnnnnnnnnnnnnnnnnnnnnnnnnnnnnnnnnnnnnnnnnnnnnnnnnnnnnnnnnnnnnnnnnnnnnnnnnnnnnnnnnnnnnnnnnnnnnnnnnnnnnnnnnnnnnnnnnnnnnnnnnnnnnnnnnnnnnnnnnnnnnnnnnnnnnnnnnnnnnnnnnnnnnnnnnnnnnnnnnnnnnnnnnnnnnnnnnnnnnnnnnnnnnnnnnnnnnnnnnnnnnnnnnnnnnnnnnnnnnnnnnnnnnnnnnnnnnnnnnnnnnnnnnnnnnnnnnnnnnnnnnnnnnnnnnnnnnnnnnnnnnnnnnnnnnnnnnnnnnnnnnnnnnnnnnnnnnnnnnnnnnnnnnnnnnnnnnnnnnnnnnnnnnnnnnnnnnnnnnnnnnnnnnnnnnnnnnnnnnnnnnnnnnnnnnnnnnnnnnnnnnnnnnnnnnnnnnnnnnnnnnnnnnnnnnnnnnnnnnnnnnnnnnnnnnnnnnnnnnnnnnnnnnnnnnnnnnnnnnnnnnnnnnnnnnnnnnnnnnnnnnnnnnnnnnnnnnnnnnnnnnnnnnnnnnnnnnnnnnnnnnnnnnnnnnnnnnnnnnnnnnnnnnnnnnnnnnnnnnnnnnnnnnnnnnnnnnnnnnnnnnnnnnnnnnnnnnnnnnnnnnnnnnnnnnnnnnnnnnnnnnnnnnnnnnnnnnnnnnnnnnnnnnnnnnnnnnnnnnnnnnnnnnnnnnnnnnnnnnnnnnnnnnnnnnnnnnnnnnnnnnnnnnnnnnnnnnnnnnnnnnnnnnnnnnnnnnnnnnnnnnnnnnnnnnnnnnnnnnnnnnnnnnnnnnnnnnnnnnnnnnnnnnnnnnnnnnnnnnnnnnnnnnnnnnnnnnnnnnnnnnnnnnnnnnnnnnnnnnnnnnnnnnnnnnnnnnnnnnnnnnnnnnnnnnnnnnnnnnnnnnnnnnnnnnnnnnnnnnnnnnnnnnnnnnnnnnnnnnnnnnnnnnnnnnnnnnnnnnnnnnnnnnnnnnnnnnnnnnnnnnnnnnnnnnnnnnnnnnnnnnnnnnnnnnnnnnnnnnnnnnnnnnnnnnnnnnnnnnnnnnnnnnnnnnnnnnnnnnnnnnnnnnnnnnnnnnnnnnnnnnnnnnnnnnnnnnnnnnnnnnnnnnnnnnnnnnnnnnnnnnnnnnnnnnnnnnnnnnnnnnnnnnnnnnnnnnnnnnnnnnnnnnnnnnnnnnnnnnnnnnnnnnnnnnnnnnnnnnnnnnnnnnnnnnnnnnnnnnnnnnnnnnnnnnnnnnnnnnnnnnnnnnnnnnnnnnnnnnnnnnnnnnnnnnnnnnnnnnnnnnnnnnnnnnnnnnnnnnnnnnnnnnnnnnnnnnnnnnnnnnnnnnnnnnnnnnnnnnnnnnnnnnnnnnnnnnnnnnnnnnnnnnnnnnnnnnnnnnnnnnnnnnnnnnnnnnnnnnnnnnnnnnnnnnnnnnnnnnnnnnnnnnnnnnnnnnnnnnnnnnnnnnnnnnnnnnnnnnnnnnnnnnnnnnnnnnnnnnnnnnnnnnnnnnnnnnnnnnnnnnnnnnnnnnnnnnnnnnnnnnnnnnnnnnnnnnnnnnnnnnnnnnnnnnnnnnnnnnnnnnnnnnnnnnnnnnnnnnnnnnnnnnnnnnnnnnnnnnnnnnnnnnnnnnnnnnnnnnnnnnnnnnnnnnnnnnnnnnnnnnnnnnnnnnnnnnnnnnnnnnnnnnnnnnnnnnnnnnnnnnnnnnnnnnnnnnnnnnnnnnnnnnnnnnnnnnnnnnnnnnnnnnnnnnnnnnnnnnnnnnnnnnnnnnnnnnnnnnnnnnnnnnnnnnnnnnnnnnnnnnnnnnnnnnnnnnnnnnnnnnnnnnnnnnnnnnnnnnnnnnnnnnnnnnnnnnnnnnnnnnnnnnnnnnnnnnnnnnnnnnnnnnnnnnnnnnnnnnnnnnnnnnnnnnnnnnnnnnnnnnnnnnnnnnnnnnnnnnnnnnnnnnnnnnnnnnnnnnnnnnnnnnnnnnnnnnnnnnnnnnnnnnnnnnnnnnnnnnnnnnnnnnnnnnnnnnnnnnnnnnnnnnnnnnnnnnnnnnnnnnnnnnnnnnnnnnnnnnnnnnnnnnnnnnnnnnnnnnnnnnnnnnnnnnnnnnnnnnnnnnnnnnnnnnnnnnnnnnnnnnnnnnnnnnnnnnnnnnnnnnnnnnnnnnnnnnnnnnnnnnnnnnnnnnnnnnnnnnnnnnnnnnnnnnnnnnnnnnnnnnnnnnnnnnnnnnnnnnnnnnnnnnnnnnnnnnnnnnnnnnnnnnnnnnnnnnnnnnnnnnnnnnnnnnnnnnnnnnnnnnnnnnnnnnnnnnnnnnnnnnnnnnnnnnnnnnnnnnnnnnnnnnnnnnnnnnnnnnnnnnnnnnnnnnnnnnnnnnnnnnnnnnnnnnnnnnnnnnnnnnnnnnnnnnnnnnnnnnnnnnnnnnnnnnnnnnnnnnnnnnnnnnnnnnnnnnnnnnnnnnnnnnnnnnnnnnnnnnnnnnnnnnnnnnnnnnnnnnnnnnnnnnnnnnnnnnnnnnnnnnnnnnnnnnnnnnnnnnnnnnnnnnnnnnnnnnnnnnnnnnnnnnnnnnnnnnnnnnnnnnnnnnnnnnnnnnnnnnnnnnnnnnnnnnnnnnnnnnnnnnnnnnnnnnnnnnnnnnnnnnnnnnnnnnnnnnnnnnnnnnnnnnnnnnnnnnnnnnnnnnnnnnnnnnnnnnnnnnnnnnnnnnnnnnnnnnnnnnnnnnnnnnnnnnnnnnnnnnnnnnnnnnnnnnnnnnnnnnnnnnnnnnnnnnnnnnnnnnnnnnnnnnnnnnnnnnnnnnnnnnnnnnnnnnnnnnnnnnnnnnnnnnnnnnnnnnnnnnnnnnnnnnnnnnnnnnnnnnnnnnnnnnnnnnnnnnnnnnnnnnnnnnnnnnnnnnnnnnnnnnnnnnnnnnnnnnnnnnnnnnnnnnnnnnnnnnnnnnnnnnnnnnnnnnnnnnnnnnnnnnnnnnnnnnnnnnnnnnnnnnnnnnnnnnnnnnnnnnnnnnnnnnnnnnnnnnnnnnnnnnnnnnnnnnnnnnnnnnnnnnnnnnnnnnnnnnnnnnnnnnnnnnnnnnnnnnnnnnnnnnnnnnnnnnnnnnnnnnnnnnnnnnnnnnnnnnnnnnnnnnnnnnnnnnnnnnnnnnnnnnnnnnnnnnnnnnnnnnnnnnnnnnnnnnnnnnnnnnnnnnnnnnnnnnnnnnnnnnnnnnnnnnnnnnnnnnnnnnnnnnnnnnnnnnnnnnnnnnnnnnnnnnnnnnnnnnnnnnnnnnnnnnnnnnnnnnnnnnnnnnnnnnnnnnnnnnnnnnnnnnnnnnnnnnnnnnnnnnnnnnnnnnnnnnnnnnnnnnnnnnnnnnnnnnnnnnnnnnnnnnnnnnnnnnnnnnnnnnnnnnnnnnnnnnnnnnnnnnnnnnnnnnnnnnnnnnnnnnnnnnnnnnnnnnnnnnnnnnnnnnnnnnnnnnnnnnnnnnnnnnnnnnnnnnnnnnnnnnnnnnnnnnnnnnnnnnnnnnnnnnnnnnnnnnnnnnnnnnnnnnnnnnnnnnnnnnnnnnnnnnnnnnnnnnnnnnnnnnnnnnnnnnnnnnnnnnnnnnnnnnnnnnnnnnnnnnnnnnnnnnnnnnnnnnnnnnnnnnnnnnnnnnnnnnnnnnnnnnnnnnnnnnnnnnnnnnnnnnnnnnnnnnnnnnnnnnnnnnnnnnnnnnnnnnnnnnnnnnnnnnnnnnnnnnnnnnnnnnnnnnnnnnnnnnnnnnnnnnnnnnnnnnnnnnnnnnnnnnnnnnnnnnnnnnnnnnnnnnnnnnnnnnnnnnnnnnnnnnnnnnnnnnnnnnnnnnnnnnnnnnnnnnnnnnnnnnnnnnnnnnnnnnnnnnnnnnnnnnnnnnnnnnnnnnnnnnnnnnnnnnnnnnnnnnnnnnnnnnnnnnnnnnnnnnnnnnnnnnnnnnnnnnnnnnnnnnnnnnnnnnnnnnnnnnnnnnnnnnnnnnnnnnnnnnnnnnnnnnnnnnnnnnnnnnnnnnnnnnnnnnnnnnnnnnnnnnnnnnnnnnnnnnnnnnnnnnnnnnnnnnnnnnnnnnnnnnnnnnnnnnnnnnnnnnnnnnnnnnnnnnnnnnnnnnnnnnnnnnnnnnnnnnnnnnnnnnnnnnnnnnnnnnnnnnnnnnnnnnnnnnnnnnnnnnnnnnnnnnnnnnnnnnnnnnnnnnnnnnnnnnnnnnnnnnnnnnnnnnnnnnnnnnnnnnnnnnnnnnnnnnnnnnnnnnnnnnnnnnnnnnnnnnnnnnnnnnnnnnnnnnnnnnnnnnnnnnnnnnnnnnnnnnnnnnnnnnnnnnnnnnnnnnnnnnnnnnnnnnnnnnnnnnnnnnnnnnnnnnnnnnnnnnnnnnnnnnnnnnnnnnnnnnnnnnnnnnnnnnnnnnnnnnnnnnnnnnnnnnnnnnnnnnnnnnnnnnnnnnnnnnnnnnnnnnnnnnnnnnnnnnnnnnnnnnnnnnnnnnnnnnnnnnnnnnnnnnnnnnnnnnnnnnnnnnnnnnnnnnnnnnnnnnnnnnnnnnnnnnnnnnnnnnnnnnnnnnnnnnnnnnnnnnnnnnnnnnnnnnnnnnnnnnnnnnnnnnnnnnnnnnnnnnnnnnnnnnnnnnnnnnnnnnnnnnnnnnnnnnnnnnnnnnnnnnnnnnnnnnnnnnnnnnnnnnnnnnnnnnnnnnnnnnnnnnnnnnnnnnnnnnnnnnnnnnnnnnnnnnnnnnnnnnnnnnnnnnnnnnnnnnnnnnnnnnnnnnnnnnnnnnnnnnnnnnnnnnnnnnnnnnnnnnnnnnnnnnnnnnnnnnnnnnnnnnnnnnnnnnnnnnnnnnnnnnnnnnnnnnnnnnnnnnnnnnnnnnnnnnnnnnnnnnnnnnnnnnnnnnnnnnnnnnnnnnnnnnnnnnnnnnnnnnnnnnnnnnnnnnnnnnnnnnnnnnnnnnnnnnnnnnnnnnnnnnnnnnnnnnnnnnnnnnnnnnnnnnnnnnnnnnnnnnnnnnnnnnnnnnnnnnnnnnnnnnnnnnnnnnnnnnnnnnnnnnnnnnnnnnnnnnnnnnnnnnnnnnnnnnnnnnnnnnnnnnnnnnnnnnnnnnnnnnnnnnnnnnnnnnnnnnnnnnnnnnnnnnnnnnnnnnnnnnnnnnnnnnnnnnnnnnnnnnnnnnnnnnnnnnnnnnnnnnnnnnnnnnnnnnnnnnnnnnnnnnnnnnnnnnnnnnnnnnnnnnnnnnnnnnnnnnnnnnnnnnnnnnnnnnnnnnnnnnnnnnnnnnnnnnnnnnnnnnnnnnnnnnnnnnnnnnnnnnnnnnnnnnnnnnnnnnnnnnnnnnnnnnnnnnnnnnnnnnnnnnnnnnnnnnnnnnnnnnnnnnnnnnnnnnnnnnnnnnnnnnnnnnnnnnnnnnnnnnnnnnnnnnnnnnnnnnnnnnnnnnnnnnnnnnnnnnnnnnnnnnnnnnnnnnnnnnnnnnnnnnnnnnnnnnnnnnnnnnnnnnnnnnnnnnnnnnnnnnnnnnnnnnnnnnnnnnnnnnnnnnnnnnnnnnnnnnnnnnnnnnnnnnnnnnnnnnnnnnnnnnnnnnnnnnnnnnnnnnnnnnnnnnnnnnnnnnnnnnnnnnnnnnnnnnnnnnnnnnnnnnnnnnnnnnnnnnnnnnnnnnnnnnnnnnnnnnnnnnnnnnnnnnnnnnnnnnnnnnnnnnnnnnnnnnnnnnnnnnnnnnnnnnnnnnnnnnnnnnnnnnnnnnnnnnnnnnnnnnnnnnnnnnnnnnnnnnnnnnnnnnnnnnnnnnnnnnnnnnnnnnnnnnnnnnnnnnnnnnnnnnnnnnnnnnnnnnnnnnnnnnnnnnnnnnnnnnnnnnnnnnnnnnnnnnnnnnnnnnnnnnnnnnnnnnnnnnnnnnnnnnnnnnnnnnnnnnnnnnnnnnnnnnnnnnnnnnnnnnnnnnnnnnnnnnnnnnnnnnnnnnnnnnnnnnnnnnnnnnnnnnnnnnnnnnnnnnnnnnnnnnnnnnnnnnnnnnnnnnnnnnnnnnnnnnnnnnnnnnnnnnnnnnnnnnnnnnnnnnnnnnnnnnnnnnnnnnnnnnnnnnnnnnnnnnnnnnnnnnnnnnnnnnnnnnnnnnnnnnnnnnnnnnnnnnnnnnnnnnnnnnnnnnnnnnnnnnnnnnnnnnnnnnnnnnnnnnnnnnnnnnnnnnnnnnnnnnnnnnnnnnnnnnnnnnnnnnnnnnnnnnnnnnnnnnnnnnnnnnnnnnnnnnnnnnnnnnnnnnnnnnnnnnnnnnnnnnnnnnnnnnnnnnnnnnnnnnnnnnnnnnnnnnnnnnnnnnnnnnnnnnnnnnnnnnnnnnnnnnnnnnnnnnnnnnnnnnnnnnnnnnnnnnnnnnnnnnnnnnnnnnnnnnnnnnnnnnnnnnnnnnnnnnnnnnnnnnnnnnnnnnnnnnnnnnnnnnnnnnnnnnnnnnnnnnnnnnnnnnnnnnnnnnnnnnnnnnnnnnnnnnnnnnnnnnnnnnnnnnnnnnnnnnnnnnnnnnnnnnnnnnnnnnnnnnnnnnnnnnnnnnnnnnnnnnnnnnnnnnnnnnnnnnnnnnnnnnnnnnnnnnnnnnnnnnnnnnnnnnnnnnnnnnnnnnnnnnnnnnnnnnnnnnnnnnnnnnnnnnnnnnnnnnnnnnnnnnnnnnnnnnnnnnnnnnnnnnnnnnnnnnnnnnnnnnnnnnnnnnnnnnnnnnnnnnnnnnnnnnnnnnnnnnnnnnnnnnnnnnnnnnnnnnnnnnnnnnnnnnnnnnnnnnnnnnnnnnnnnnnnnnnnnnnnnnnnnnnnnnnnnnnnnnnnnnnnnnnnnnnnnnnnnnnnnnnnnnnnnnnnnnnnnnnnnnnnnnnnnnnnnnnnnnnnnnnnnnnnnnnnnnnnnnnnnnnnnnnnnnnnnnnnnnnnnnnnnnnnnnnnnnnnnnnnnnnnnnnnnnnnnnnnnnnnnnnnnnnnnnnnnnnnnnnnnnnnnnnnnnnnnnnnnnnnnnnnnnnnnnnnnnnnnnnnnnnnnnnnnnnnnnnnnnnnnnnnnnnnnnnnnnnnnnnnnnnnnnnnnnnnnnnnnnnnnnnnnnnnnnnnnnnnnnnnnnnnnnnnnnnnnnnnnnnnnnnnnnnnnnnnnnnnnnnnnnnnnnnnnnnnnnnnnnnnnnnnnnnnnnnnnnnnnnnnnnnnnnnnnnnnnnnnnnnnnnnnnnnnnnnnnnnnnnnnnnnnnnnnnnnnnnnnnnnnnnnnnnnnnnnnnnnnnnnnnnnnnnnnnnnnnnnnnnnnnnnnnnnnnnnnnnnnnnnnnnnnnnnnnnnnnnnnnnnnnnnnnnnnnnnnnnnnnnnnnnnnnnnnnnnnnnnnnnnnnnnnnnnnnnnnnnnnnnnnnnnnnnnnnnnnnnnnnnnnnnnnnnnnnnnnnnnnnnnnnnnnnnnnnnnnnnnnnnnnnnnnnnnnnnnnnnnnnnnnnnnnnnnnnnnnnnnnnnnnnnnnnnnnnnnnnnnnnnnnnnnnnnnnnnnnnnnnnnnnnnnnnnnnnnnnnnnnnnnnnnnnnnnnnnnnnnnnnnnnnnnnnnnnnnnnnnnnnnnnnnnnnnnnnnnnnnnnnnnnnnnnnnnnnnnnnnnnnnnnnnnnnnnnnnnnnnnnnnnnnnnnnnnnnnnnnnnnnnnnnnnnnnnnnnnnnnnnnnnnnnnnnnnnnnnnnnnnnnnnnnnnnnnnnnnnnnnnnnnnnnnnnnnnnnnnnnnnnnnnnnnnnnnnnnnnnnnnnnnnnnnnnnnnnnnnnnnnnnnnnnnnnnnnnnnnnnnnnnnnnnnnnnnnnnnnnnnnnnnnnnnnnnnnnnnnnnnnnnnnnnnnnnnnnnnnnnnnnnnnnnnnnnnnnnnnnnnnnnnnnnnnnnnnnnnnnnnnnnnnnnnnnnnnnnnnnnnnnnnnnnnnnnnnnnnnnnnnnnnnnnnnnnnnnnnnnnnnnnnnnnnnnnnnnnnnnnnnnnnnnnnnnnnnnnnnnnnnnnnnnnnnnnnnnnnnnnnnnnnnnnnnnnnnnnnnnnnnnnnnnnnnnnnnnnnnnnnnnnnnnnnnnnnnnnnnnnnnnnnnnnnnnnnnnnnnnnnnnnnnnnnnnnnnnnnnnnnnnnnnnnnnnnnnnnnnnnnnnnnnnnnnnnnnnnnnnnnnnnnnnnnnnnnnnnnnnnnnnnnnnnnnnnnnnnnnnnnnnnnnnnnnnnnnnnnnnnnnnnnnnnnnnnnnnnnnnnnnnnnnnnnnnnnnnnnnnnnnnnnnnnnnnnnnnnnnnnnnnnnnnnnnnnnnnnnnnnnnnnnnnnnnnnnnnnnnnnnnnnnnnnnnnnnnnnnnnnnnnnnnnnnnnnnnnnnnnnnnnnnnnnnnnnnnnnnnnnnnnnnnnnnnnnnnnnnnnnnnnnnnnnnnnnnnnnnnnnnnnnnnnnnnnnnnnnnnnnnnnnnnnnnnnnnnnnnnnnnnnnnnnnnnnnnnnnnnnnnnnnnnnnnnnnnnnnnnnnnnnnnnnnnnnnnnnnnnnnnnnnnnnnnnnnnnnnnnnnnnnnnnnnnnnnnnnnnnnnnnnnnnnnnnnnnnnnnnnnnnnnnnnnnnnnnnnnnnnnnnnnnnnnnnnnnnnnnnnnnnnnnnnnnnnnnnnnnnnnnnnnnnnnnnnnnnnnnnnnnnnnnnnnnnnnnnnnnnnnnnnnnnnnnnnnnnnnnnnnnnnnnnnnnnnnnnnnnnnnnnnnnnnnnnnnnnnnnnnnnnnnnnnnnnnnnnnnnnnnnnnnnnnnnnnnnnnnnnnnnnnnnnnnnnnnnnnnnnnnnnnnnnnnnnnnnnnnnnnnnnnnnnnnnnnnnnnnnnnnnnnnnnnnnnnnnnnnnnnnnnnnnnnnnnnnnnnnnnnnnnnnnnnnnnnnnnnnnnnnnnnnnnnnnnnnnnnnnnnnnnnnnnnnnnnnnnnnnnnnnnnnnnnnnnnnnnnnnnnnnnnnnnnnnnnnnnnnnnnnnnnnnnnnnnnnnnnnnnnnnnnnnnnnnnnnnnnnnnnnnnnnnnnnnnnnnnnnnnnnnnnnnnnnnnnnnnnnnnnnnnnnnnnnnnnnnnnnnnnnnnnnnnnnnnnnnnnnnnnnnnnnnnnnnnnnnnnnnnnnnnnnnnnnnnnnnnnnnnnnnnnnnnnnnnnnnnnnnnnnnnnnnnnnnnnnnnnnnnnnnnnnnnnnnnnnnnnnnnnnnnnnnnnnnnnnnnnnnnnnnnnnnnnnnnnnnnnnnnnnnnnnnnnnnnnnnnnnnnnnnnnnnnnnnnnnnnnnnnnnnnnnnnnnnnnnnnnnnnnnnnnnnnnnnnnnnnnnnnnnnnnnnnnnnnnnnnnnnnnnnnnnnnnnnnnnnnnnnnnnnnnnnnnnnnnnnnnnnnnnnnnnnnnnnnnnnnnnnnnnnnnnnnnnnnnnnnnnnnnnnnnnnnnnnnnnnnnnnnnnnnnnnnnnnnnnnnnnnnnnnnnnnnnnnnnnnnnnnnnnnnnnnnnnnnnnnnnnnnnnnnnnnnnnnnnnnnnnnnnnnnnnnnnnnnnnnnnnnnnnnnnnnnnnnnnnnnnnnnnnnnnnnnnnnnnnnnnnnnnnnnnnnnnnnnnnnnnnnnnnnnnnnnnnnnnnnnnnnnnnnnnnnnnnnnnnnnnnnnnnnnnnnnnnnnnnnnnnnnnnnnnnnnnnnnnnnnnnnnnnnnnnnnnnnnnnnnnnnnnnnnnnnnnnnnnnnnnnnnnnnnnnnnnnnnnnnnnnnnnnnnnnnnnnnnnnnnnnnnnnnnnnnnnnnnnnnnnnnnnnnnnnnnnnnnnnnnnnnnnnnnnnnnnnnnnnnnnnnnnnnnnnnnnnnnnnnnnnnnnnnnnnnnnnnnnnnnnnnnnnnnnnnnnnnnnnnnnnnnnnnnnnnnnnnnnnnnnnnnnnnnnnnnnnnnnnnnnnnnnnnnnnnnnnnnnnnnnnnnnnnnnnnnnnnnnnnnnnnnnnnnnnnnnnnnnnnnnnnnnnnnnnnnnnnnnnnnnnnnnnnnnnnnnnnnnnnnnnnnnnnnnnnnnnnnnnnnnnnnnnnnnnnnnnnnnnnnnnnnnnnnnnnnnnnnnnnnnnnnnnnnnnnnnnnnnnnnnnnnnnnnnnnnnnnnnnnnnnnnnnnnnnnnnnnnnnnnnnnnnnnnnnnnnnnnnnnnnnnnnnnnnnnnnnnnnnnnnnnnnnnnnnnnnnnnnnnnnnnnnnnnnnnnnnnnnnnnnnnnnnnnnnnnnnnnnnnnnnnnnnnnnnnnnnnnnnnnnnnnnnnnnnnnnnnnnnnnnnnnnnnnnnnnnnnnnnnnnnnnnnnnnnnnnnnnnnnnnnnnnnnnnnnnnnnnnnnnnnnnnnnnnnnnnnnnnnnnnnnnnnnnnnnnnnnnnnnnnnnnnnnnnnnnnnnnnnnnnnnnnnnnnnnnnnnnnnnnnnnnnnnnnnnnnnnnnnnnnnnnnnnnnnnnnnnnnnnnnnnnnnnnnnnnnnnnnnnnnnnnnnnnnnnnnnnnnnnnnnnnnnnnnnnnnnnnnnnnnnnnnnnnnnnnnnnnnnnnnnnnnnnnnnnnnnnnnnnnnnnnnnnnnnnnnnnnnnnnnnnnnnnnnnnnnnnnnnnnnnnnnnnnnnnnnnnnnnnnnnnnnnnnnnnnnnnnnnnnnnnnnnnnnnnnnnnnnnnnnnnnnnnnnnnnnnnnnnnnnnnnnnnnnnnnnnnnnnnnnnnnnnnnnnnnnnnnnnnnnnnnnnnnnnnnnnnnnnnnnnnnnnnnnnnnnnnnnnnnnnnnnnnnnnnnnnnnnnnnnnnnnnnnnnnnnnnnnnnnnnnnnnnnnnnnnnnnnnnnnnnnnnnnnnnnnnnnnnnnnnnnnnnnnnnnnnnnnnnnnnnnnnnnnnnnnnnnnnnnnnnnnnnnnnnnnnnnnnnnnnnnnnnnnnnnnnnnnnnnnnnnnnnnnnnnnnnnnnnnnnnnnnnnnnnnnnnnnnnnnnnnnnnnnnnnnnnnnnnnnnnnnnnnnnnnnnnnnnnnnnnnnnnnnnnnnnnnnnnnnnnnnnnnnnnnnnnnnnnnnnnnnnnnnnnnnnnnnnnnnnnnnnnnnnnnnnnnnnnnnnnnnnnnnnnnnnnnnnnnnnnnnnnnnnnnnnnnnnnnnnnnnnnnnnnnnnnnnnnnnnnnnnnnnnnnnnnnnnnnnnnnnnnnnnnnnnnnnnnnnnnnnnnnnnnnnnnnnnnnnnnnnnnnnnnnnnnnnnnnnnnnnnnnnnnnnnnnnnnnnnnnnnnnnnnnnnnnnnnnnnnnnnnnnnnnnnnnnnnnnnnnnnnnnnnnnnnnnnnnnnnnnnnnnnnnnnnnnnnnnnnnnnnnnnnnnnnnnnnnnnnnnnnnnnnnnnnnnnnnnnnnnnnnnnnnnnnnnnnnnnnnnnnnnnnnnnnnnnnnnnnnnnnnnnnnnnnnnnnnnnnnnnnnnnnnnnnnnnnnnnnnnnnnnnnnnnnnnnnnnnnnnnnnnnnnnnnnnnnnnnnnnnnnnnnnnnnnnnnnnnnnnnnnnnnnnnnnnnnnnnnnnnnnnnnnnnnnnnnnnnnnnnnnnnnnnnnnnnnnnnnnnnnnnnnnnnnnnnnnnnnnnnnnnnnnnnnnnnnnnnnnnnnnnnnnnnnnnnnnnnnnnnnnnnnnnnnnnnnnnnnnnnnnnnnnnnnnnnnnnnnnnnnnnnnnnnnnnnnnnnnnnnnnnnnnnnnnnnnnnnnnnnnnnnnnnnnnnnnnnnnnnnnnnnnnnnnnnnnnnnnnnnnnnnnnnnnnnnnnnnnnnnnnnnnnnnnnnnnnnnnnnnnnnnnnnnnnnnnnnnnnnnnnnnnnnnnnnnnnnnnnnnnnnnnnnnnnnnnnnnnnnnnnnnnnnnnnnnnnnnnnnnnnnnnnnnnnnnnnnnnnnnnnnnnnnnnnnnnnnnnnnnnnnnnnnnnnnnnnnnnnnnnnnnnnnnnnnnnnnnnnnnnnnnnnnnnnnnnnnnnnnnnnnnnnnnnnnnnnnnnnnnnnnnnnnnnnnnnnnnnnnnnnnnnnnnnnnnnnnnnnnnnnnnnnnnnnnnnnnnnnnnnnnnnnnnnnnnnnnnnnnnnnnnnnnnnnnnnnnnnnnnnnnnnnnnnnnnnnnnnnnnnnnnnnnnnnnnnnnnnnnnnnnnnnnnnnnnnnnnnnnnnnnnnnnnnnnnnnnnnnnnnnnnnnnnnnnnnnnnnnnnnnnnnnnnnnnnnnnnnnnnnnnnnnnnnnnnnnnnnnnnnnnnnnnnnnnnnnnnnnnnnnnnnnnnnnnnnnnnnnnnnnnnnnnnnnnnnnnnnnnnnnnnnnnnnnnnnnnnnnnnnnnnnnnnnnnnnnnnnnnnnnnnnnnnnnnnnnnnnnnnnnnnnnnnnnnnnnnnnnnnnnnnnnnnnnnnnnnnnnnnnnnnnnnnnnnnnnnnnnnnnnnnnnnnnnnnnnnnnnnnnnnnnnnnnnnnnnnnnnnnnnnnnnnnnnnnnnnnnnnnnnnnnnnnnnnnnnnnnnnnnnnnnnnnnnnnnnnnnnnnnnnnnnnnnnnnnnnnnnnnnnnnnnnnnnnnnnnnnnnnnnnnnnnnnnnnnnnnnnnnnnnnnnnnnnnnnnnnnnnnnnnnnnnnnnnnnnnnnnnnnnnnnnnnnnnnnnnnnnnnnnnnnnnnnnnnnnnnnnnnnnnnnnnnnnnnnnnnnnnnnnnnnnnnnnnnnnnnnnnnnnnnnnnnnnnnnnnnnnnnnnnnnnnnnnnnnnnnnnnnnnnnnnnnnnnnnnnnnnnnnnnnnnnnnnnnnnnnnnnnnnnnnnnnnnnnnnnnnnnnnnnnnnnnnnnnnnnnnnnnnnnnnnnnnnnnnnnnnnnnnnnnnnnnnnnnnnnnnnnnnnnnnnnnnnnnnnnnnnnnnnnnnnnnnnnnnnnnnnnnnnnnnnnnnnnnnnnnnnnnnnnnnnnnnnnnnnnnnnnnnnnnnnnnnnnnnnnnnnnnnnnnnnnnnnnnnnnnnnnnnnnnnnnnnnnnnnnnnnnnnnnnnnnnnnnnnnnnnnnnnnnnnnnnnnnnnnnnnnnnnnnnnnnnnnnnnnnnnnnnnnnnnnnnnnnnnnnnnnnnnnnnnnnnnnnnnnnnnnnnnnnnnnnnnnnnnnnnnnnnnnnnnnnnnnnnnnnnnnnnnnnnnnnnnnnnnnnnnnnnnnnnnnnnnnnnnnnnnnnnnnnnnnnnnnnnnnnnnnnnnnnnnnnnnnnnnnnnnnnnnnnnnnnnnnnnnnnnnnnnnnnnnnnnnnnnnnnnnnnnnnnnnnnnnnnnnnnnnnnnnnnnnnnnnnnnnnnnnnnnnnnnnnnnnnnnnnnnnnnnnnnnnnnnnnnnnnnnnnnnnnnnnnnnnnnnnnnnnnnnnnnnnnnnnnnnnnnnnnnnnnnnnnnnnnnnnnnnnnnnnnnnnnnnnnnnnnnnnnnnnnnnnnnnnnnnnnnnnnnnnnnnnnnnnnnnnnnnnnnnnnnnnnnnnnnnnnnnnnnnnnnnnnnnnnnnnnnnnnnnnnnnnnnnnnnnnnnnnnnnnnnnnnnnnnnnnnnnnnnnnnnnnnnnnnnnnnnnnnnnnnnnnnnnnnnnnnnnnnnnnnnnnnnnnnnnnnnnnnnnnnnnnnnnnnnnnnnnnnnnnnnnnnnnnnnnnnnnnnnnnnnnnnnnnnnnnnnnnnnnnnnnnnnnnnnnnnnnnnnnnnnnnnnnnnnnnnnnnnnnnnnnnnnnnnnnnnnnnnnnnnnnnnnnnnnnnnnnnnnnnnnnnnnnnnnnnnnnnnnnnnnnnnnnnnnnnnnnnnnnnnnnnnnnnnnnnnnnnnnnnnnnnnnnnnnnnnnnnnnnnnnnnnnnnnnnnnnnnnnnnnnnnnnnnnnnnnnnnnnnnnnnnnnnnnnnnnnnnnnnnnnnnnnnnnnnnnnnnnnnnnnnnnnnnnnnnnnnnnnnnnnnnnnnnnnnnnnnnnnnnnnnnnnnnnnnnnnnnnnnnnnnnnnnnnnnnnnnnnnnnnnnnnnnnnnnnnnnnnnnnnnnnnnnnnnnnnnnnnnnnnnnnnnnnnnnnnnnnnnnnnnnnnnnnnnnnnnnnnnnnnnnnnnnnnnnnnnnnnnnnnnnnnnnnnnnnnnnnnnnnnnnnnnnnnnnnnnnnnnnnnnnnnnnnnnnnnnnnnnnnnnnnnnnnnnnnnnnnnnnnnnnnnnnnnnnnnnnnnnnnnnnnnnnnnnnnnnnnnnnnnnnnnnnnnnnnnnnnnnnnnnnnnnnnnnnnnnnnnnnnnnnnnnnnnnnnnnnnnnnnnnnnnnnnnnnnnnnnnnnnnnnnnnnnnnnnnnnnnnnnnnnnnnnnnnnnnnnnnnnnnnnnnnnnnnnnnnnnnnnnnnnnnnnnnnnnnnnnnnnnnnnnnnnnnnnnnnnnnnnnnnnnnnnnnnnnnnnnnnnnnnnnnnnnnnnnnnnnnnnnnnnnnnnnnnnnnnnnnnnnnnnnnnnnnnnnnnnnnnnnnnnnnnnnnnnnnnnnnnnnnnnnnnnnnnnnnnnnnnnnnnnnnnnnnnnnnnnnnnnnnnnnnnnnnnnnnnnnnnnnnnnnnnnnnnnnnnnnnnnnnnnnnnnnnnnnnnnnnnnnnnnnnnnnnnnnnnnnnnnnnnnnnnnnnnnnnnnnnnnnnnnnnnnnnnnnnnnnnnnnnnnnnnnnnnnnnnnnnnnnnnnnnnnnnnnnnnnnnnnnnnnnnnnnnnnnnnnnnnnnnnnnnnnnnnnnnnnnnnnnnnnnnnnnnnnnnnnnnnnnnnnnnnnnnnnnnnnnnnnnnnnnnnnnnnnnnnnnnnnnnnnnnnnnnnnnnnnnnnnnnnnnnnnnnnnnnnnnnnnnnnnnnnnnnnnnnnnnnnnnnnnnnnnnnnnnnnnnnnnnnnnnnnnnnnnnnnnnnnnnnnnnnnnnnnnnnnnnnnnnnnnnnnnnnnnnnnnnnnnnnnnnnnnnnnnnnnnnnnnnnnnnnnnnnnnnnnnnnnnnnnnnnnnnnnnnnnnnnnnnnnnnnnnnnnnnnnnnnnnnnnnnnnnnnnnnnnnnnnnnnnnnnnnnnnnnnnnnnnnnnnnnnnnnnnnnnnnnnnnnnnnnnnnnnnnnnnnnnnnnnnnnnnnnnnnnnnnnnnnnnnnnnnnnnnnnnnnnnnnnnnnnnnnnnnnnnnnnnnnnnnnnnnnnnnnnnnnnnnnnnnnnnnnnnnnnnnnnnnnnnnnnnnnnnnnnnnnnnnnnnnnnnnnnnnnnnnnnnnnnnnnnnnnnnnnnnnnnnnnnnnnnnnnnnnnnnnnnnnnnnnnnnnnnnnnnnnnnnnnnnnnnnnnnnnnnnnnnnnnnnnnnnnnnnnnnnnnnnnnnnnnnnnnnnnnnnnnnnnnnnnnnnnnnnnnnnnnnnnnnnnnnnnnnnnnnnnnnnnnnnnnnnnnnnnnnnnnnnnnnnnnnnnnnnnnnnnnnnnnnnnnnnnnnnnnnnnnnnnnnnnnnnnnnnnnnnnnnnnnnnnnnnnnnnnnnnnnnnnnnnnnnnnnnnnnnnnnnnnnnnnnnnnnnnnnnnnnnnnnnnnnnnnnnnnnnnnnnnnnnnnnnnnnnnnnnnnnnnnnnnnnnnnnnnnnnnnnnnnnnnnnnnnnnnnnnnnnnnnnnnnnnnnnnnnnnnnnnnnnnnnnnnnnnnnnnnnnnnnnnnnnnnnnnnnnnnnnnnnnnnnnnnnnnnnnnnnnnnnnnnnnnnnnnnnnnnnnnnnnnnnnnnnnnnnnnnnnnnnnnnnnnnnnnnnnnnnnnnnnnnnnnnnnnnnnnnnnnnnnnnnnnnnnnnnnnnnnnnnnnnnnnnnnnnnnnnnnnnnnnnnnnnnnnnnnnnnnnnnnnnnnnnnnnnnnnnnnnnnnnnnnnnnnnnnnnnnnnnnnnnnnnnnnnnnnnnnnnnnnnnnnnnnnnnnnnnnnnnnnnnnnnnnnnnnnnnnnnnnnnnnnnnnnnnnnnnnnnnnnnnnnnnnnnnnnnnnnnnnnnnnnnnnnnnnnnnnnnnnnnnnnnnnnnnnnnnnnnnnnnnnnnnnnnnnnnnnnnnnnnnnnnnnnnnnnnnnnnnnnnnnnnnnnnnnnnnnnnnnnnnnnnnnnnnnnnnnnnnnnnnnnnnnnnnnnnnnnnnnnnnnnnnnnnnnnnnnnnnnnnnnnnnnnnnnnnnnnnnnnnnnnnnnnnnnnnnnnnnnnnnnnnnnnnnnnnnnnnnnnnnnnnnnnnnnnnnnnnnnnnnnnnnnnnnnnnnnnnnnnnnnnnnnnnnnnnnnnnnnnnnnnnnnnnnnnnnnnnnnnnnnnnnnnnnnnnnnnnnnnnnnnnnnnnnnnnnnnnnnnnnnnnnnnnnnnnnnnnnnnnnnnnnnnnnnnnnnnnnnnnnnnnnnnnnnnnnnnnnnnnnnnnnnnnnnnnnnnnnnnnnnnnnnnnnnnnnnnnnnnnnnnnnnnnnnnnnnnnnnnnnnnnnnnnnnnnnnnnnnnnnnnnnnnnnnnnnnnnnnnnnnnnnnnnnnnnnnnnnnnnnnnnnnnnnnnnnnnnnnnnnnnnnnnnnnnnnnnnnnnnnnnnnnnnnnnnnnnnnnnnnnnnnnnnnnnnnnnnnnnnnnnnnnnnnnnnnnnnnnnnnnnnnnnnnnnnnnnnnnnnnnnnnnnnnnnnnnnnnnnnnnnnnnnnnnnnnnnnnnnnnnnnnnnnnnnnnnnnnnnnnnnnnnnnnnnnnnnnnnnnnnnnnnnnnnnnnnnnnnnnnnnnnnnnnnnnnnnnnnnnnnnnnnnnnnnnnnnnnnnnnnnnnnnnnnnnnnnnnnnnnnnnnnnnnnnnnnnnnnnnnnnnnnnnnnnnnnnnnnnnnnnnnnnnnnnnnnnnnnnnnnnnnnnnnnnnnnnnnnnnnnnnnnnnnnnnnnnnnnnnnnnnnnnnnnnnnnnnnnnnnnnnnnnnnnnnnnnnnnnnnnnnnnnnnnnnnnnnnnnnnnnnnnnnnnnnnnnnnnnnnnnnnnnnnnnnnnnnnnnnnnnnnnnnnnnnnnnnnnnnnnnnnnnnnnnnnnnnnnnnnnnnnnnnnnnnnnnnnnnnnnnnnnnnnnnnnnnnnnnnnnnnnnnnnnnnnnnnnnnnnnnnnnnnnnnnnnnnnnnnnnnnnnnnnnnnnnnnnnnnnnnnnnnnnnnnnnnnnnnnnnnnnnnnnnnnnnnnnnnnnnnnnnnnnnnnnnnnnnnnnnnnnnnnnnnnnnnnnnnnnnnnnnnnnnnnnnnnnnnnnnnnnnnnnnnnnnnnnnnnnnnnnnnnnnnnnnnnnnnnnnnnnnnnnnnnnnnnnnnnnnnnnnnnnnnnnnnnnnnnnnnnnnnnnnnnnnnnnnnnnnnnnnnnnnnnnnnnnnnnnnnnnnnnnnnnnnnnnnnnnnnnnnnnnnnnnnnnnnnnnnnnnnnnnnnnnnnnnnnnnnnnnnnnnnnnnnnnnnnnnnnnnnnnnnnnnnnnnnnnnnnnnnnnnnnnnnnnnnnnnnnnnnnnnnnnnnnnnnnnnnnnnnnnnnnnnnnnnnnnnnnnnnnnnnnnnnnnnnnnnnnnnnnnnnnnnnnnnnnnnnnnnnnnnnnnnnnnnnnnnnnnnnnnnnnnnnnnnnnnnnnnnnnnnnnnnnnnnnnnnnnnnnnnnnnnnnnnnnnnnnnnnnnnnnnnnnnnnnnnnnnnnnnnnnnnnnnnnnnnnnnnnnnnnnnnnnnnnnnnnnnnnnnnnnnnnnnnnnnnnnnnnnnnnnnnnnnnnnnnnnnnnnnnnnnnnnnnnnnnnnnnnnnnnnnnnnnnnnnnnnnnnnnnnnnnnnnnnnnnnnnnnnnnnnnnnnnnnnnnnnnnnnnnnnnnnnnnnnnnnnnnnnnnnnnnnnnnnnnnnnnnnnnnnnnnnnnnnnnnnnnnnnnnnnnnnnnnnnnnnnnnnnnnnnnnnnnnnnnnnnnnnnnnnnnnnnnnnnnnnnnnnnnnnnnnnnnnnnnnnnnnnnnnnnnnnnnnnnnnnnnnnnnnnnnnnnnnnnnnnnnnnnnnnnnnnnnnnnnnnnnnnnnnnnnnnnnnnnnnnnnnnnnnnnnnnnnnnnnnnnnnnnnnnnnnnnnnnnnnnnnnnnnnnnnnnnnnnnnnnnnnnnnnnnnnnnnnnnnnnnnnnnnnnnnnnnnnnnnnnnnnnnnnnnnnnnnnnnnnnnnnnnnnnnnnnnnnnnnnnnnnnnnnnnnnnnnnnnnnnnnnnnnnnnnnnnnnnnnnnnnnnnnnnnnnnnnnnnnnnnnnnnnnnnnnnnnnnnnnnnnnnnnnnnnnnnnnnnnnnnnnnnnnnnnnnnnnnnnnnnnnnnnnnnnnnnnnnnnnnnnnnnnnnnnnnnnnnnnnnnnnnnnnnnnnnnnnnnnnnnnnnnnnnnnnnnnnnnnnnnnnnnnnnnnnnnnnnnnnnnnnnnnnnnnnnnnnnnnnnnnnnnnnnnnnnnnnnnnnnnnnnnnnnnnnnnnnnnnnnnnnnnnnnnnnnnnnnnnnnnnnnnnnnnnnnnnnnnnnnnnnnnnnnnnnnnnnnnnnnnnnnnnnnnnnnnnnnnnnnnnnnnnnnnnnnnnnnnnnnnnnnnnnnnnnnnnnnnnnnnnnnnnnnnnnnnnnnnnnnnnnnnnnnnnnnnnnnnnnnnnnnnnnnnnnnnnnnnnnnnnnnnnnnnnnnnnnnnnnnnnnnnnnnnnnnnnnnnnnnnnnnnnnnnnnnnnnnnnnnnnnnnnnnnnnnnnnnnnnnnnnnnnnnnnnnnnnnnnnnnnnnnnnnnnnnnnnnnnnnnnnnnnnnnnnnnnnnnnnnnnnnnnnnnnnnnnnnnnnnnnnnnnnnnnnnnnnnnnnnnnnnnnnnnnnnnnnnnnnnnnnnnnnnnnnnnnnnnnnnnnnnnnnnnnnnnnnnnnnnnnnnnnnnnnnnnnnnnnnnnnnnnnnnnnnnnnnnnnnnnnnnnnnnnnnnnnnnnnnnnnnnnnnnnnnnnnnnnnnnnnnnnnnnnnnnnnnnnnnnnnnnnnnnnnnnnnnnnnnnnnnnnnnnnnnnnnnnnnnnnnnnnnnnnnnnnnnnnnnnnnnnnnnnnnnnnnnnnnnnnnnnnnnnnnnnnnnnnnnnnnnnnnnnnnnnnnnnnnnnnnnnnnnnnnnnnnnnnnnnnnnnnnnnnnnnnnnnnnnnnnnnnnnnnnnnnnnnnnnnnnnnnnnnnnnnnnnnnnnnnnnnnnnnnnnnnnnnnnnnnnnnnnnnnnnnnnnnnnnnnnnnnnnnnnnnnnnnnnnnnnnnnnnnnnnnnnnnnnnnnnnnnnnnnnnnnnnnnnnnnnnnnnnnnnnnnnnnnnnnnnnnnnnnnnnnnnnnnnnnnnnnnnnnnnnnnnnnnnnnnnnnnnnnnnnnnnnnnnnnnnnnnnnnnnnnnnnnnnnnnnnnnnnnnnnnnnnnnnnnnnnnnnnnnnnnnnnnnnnnnnnnnnnnnnnnnnnnnnnnnnnnnnnnnnnnnnnnnnnnnnnnnnnnnnnnnnnnnnnnnnnnnnnnnnnnnnnnnnnnnnnnnnnnnnnnnnnnnnnnnnnnnnnnnnnnnnnnnnnnnnnnnnnnnnnnnnnnnnnnnnnnnnnnnnnnnnnnnnnnnnnnnnnnnnnnnnnnnnnnnnnnnnnnnnnnnnnnnnnnnnnnnnnnnnnnnnnnnnnnnnnnnnnnnnnnnnnnnnnnnnnnnnnnnnnnnnnnnnnnnnnnnnnnnnnnnnnnnnnnnnnnnnnnnnnnnnnnnnnnnnnnnnnnnnnnnnnnnnnnnnnnnnnnnnnnnnnnnnnnnnnnnnnnnnnnnnnnnnnnnnnnnnnnnnnnnnnnnnnnnnnnnnnnnnnnnnnnnnnnnnnnnnnnnnnnnnnnnnnnnnnnnnnnnnnnnnnnnnnnnnnnnnnnnnnnnnnnnnnnnnnnnnnnnnnnnnnnnnnnnnnnnnnnnnnnnnnnnnnnnnnnnnnnnnnnnnnnnnnnnnnnnnnnnnnnnnnnnnnnnnnnnnnnnnnnnnnnnnnnnnnnnnnnnnnnnnnnnnnnnnnnnnnnnnnnnnnnnnnnnnnnnnnnnnnnnnnnnnnnnnnnnnnnnnnnnnnnnnnnnnnnnnnnnnnnnnnnnnnnnnnnnnnnnnnnnnnnnnnnnnnnnnnnnnnnnnnnnnnnnnnnnnnnnnnnnnnnnnnnnnnnnnnnnnnnnnnnnnnnnnnnnnnnnnnnnnnnnnnnnnnnnnnnnnnnnnnnnnnnnnnnnnnnnnnnnnnnnnnnnnnnnnnnnnnnnnnnnnnnnnnnnnnnnnnnnnnnnnnnnnnnnnnnnnnnnnnnnnnnnnnnnnnnnnnnnnnnnnnnnnnnnnnnnnnnnnnnnnnnnnnnnnnnnnnnnnnnnnnnnnnnnnnnnnnnnnnnnnnnnnnnnnnnnnnnnnnnnnnnnnnnnnnnnnnnnnnnnnnnnnnnnnnnnnnnnnnnnnnnnnnnnnnnnnnnnnnnnnnnnnnnnnnnnnnnnnnnnnnnnnnnnnnnnnnnnnnnnnnnnnnnnnnnnnnnnnnnnnnnnnnnnnnnnnnnnnnnnnnnnnnnnnnnnnnnnnnnnnnnnnnnnnnnnnnnnnnnnnnnnnnnnnnnnnnnnnnnnnnnnnnnnnnnnnnnnnnnnnnnnnnnnnnnnnnnnnnnnnnnnnnnnnnnnnnnnnnnnnnnnnnnnnnnnnnnnnnnnnnnnnnnnnnnnnnnnnnnnnnnnnnnnnnnnnnnnnnnnnnnnnnnnnnnnnnnnnnnnnnnnnnnnnnnnnnnnnnnnnnnnnnnnnnnnnnnnnnnnnnnnnnnnnnnnnnnnnnnnnnnnnnnnnnnnnnnnnnnnnnnnnnnnnnnnnnnnnnnnnnnnnnnnnnnnnnnnnnnnnnnnnnnnnnnnnnnnnnnnnnnnnnnnnnnnnnnnnnnnnnnnnnnnnnnnnnnnnnnnnnnnnnnnnnnnnnnnnnnnnnnnnnnnnnnnnnnnnnnnnnnnnnnnnnnnnnnnnnnnnnnnnnnnnnnnnnnnnnnnnnnnnnnnnnnnnnnnnnnnnnnnnnnnnnnnnnnnnnnnnnnnnnnnnnnnnnnnnnnnnnnnnnnnnnnnnnnnnnnnnnnnnnnnnnnnnnnnnnnnnnnnnnnnnnnnnnnnnnnnnnnnnnnnnnnnnnnnnnnnnnnnnnnnnnnnnnnnnnnnnnnnnnnnnnnnnnnnnnnnnnnnnnnnnnnnnnnnnnnnnnnnnnnnnnnnnnnnnnnnnnnnnnnnnnnnnnnnnnnnnnnnnnnnnnnnnnnnnnnnnnnnnnnnnnnnnnnnnnnnnnnnnnnnnnnnnnnnnnnnnnnnnnnnnnnnnnnnnnnnnnnnnnnnnnnnnnnnnnnnnnnnnnnnnnnnnnnnnnnnnnnnnnnnnnnnnnnnnnnnnnnnnnnnnnnnnnnnnnnnnnnnnnnnnnnnnnnnnnnnnnnnnnnnnnnnnnnnnnnnnnnnnnnnnnnnnnnnnnnnnnnnnnnnnnnnnnnnnnnnnnnnnnnnnnnnnnnnnnnnnnnnnnnnnnnnnnnnnnnnnnnnnnnnnnnnnnnnnnnnnnnnnnnnnnnnnnnnnnnnnnnnnnnnnnnnnnnnnnnnnnnnnnnnnnnnnnnnnnnnnnnnnnnnnnnnnnnnnnnnnnnnnnnnnnnnnnnnnnnnnnnnnnnnnnnnnnnnnnnnnnnnnnnnnnnnnnnnnnnnnnnnnnnnnnnnnnnnnnnnnnnnnnnnnnnnnnnnnnnnnnnnnnnnnnnnnnnnnnnnnnnnnnnnnnnnnnnnnnnnnnnnnnnnnnnnnnnnnnnnnnnnnnnnnnnnnnnnnnnnnnnnnnnnnnnnnnnnnnnnnnnnnnnnnnnnnnnnnnnnnnnnnnnnnnnnnnnnnnnnnnnnnnnnnnnnnnnnnnnnnnnnnnnnnnnnnnnnnnnnnnnnnnnnnnnnnnnnnnnnnnnnnnnnnnnnnnnnnnnnnnnnnnnnnnnnnnnnnnnnnnnnnnnnnnnnnnnnnnnnnnnnnnnnnnnnnnnnnnnnnnnnnnnnnnnnnnnnnnnnnnnnnnnnnnnnnnnnnnnnnnnnnnnnnnnnnnnnnnnnnnnnnnnnnnnnnnnnnnnnnnnnnnnnnnnnnnnnnnnnnnnnnnnnnnnnnnnnnnnnnnnnnnnnnnnnnnnnnnnnnnnnnnnnnnnnnnnnnnnnnnnnnnnnnnnnnnnnnnnnnnnnnnnnnnnnnnnnnnnnnnnnnnnnnnnnnnnnnnnnnnnnnnnnnnnnnnnnnnnnnnnnnnnnnnnnnnnnnnnnnnnnnnnnnnnnnnnnnnnnnnnnnnnnnnnnnnnnnnnnnnnnnnnnnnnnnnnnnnnnnnnnnnnnnnnnnnnnnnnnnnnnnnnnnnnnnnnnnnnnnnnnnnnnnnnnnnnnnnnnnnnnnnnnnnnnnnnnnnnnnnnnnnnnnnnnnnnnnnnnnnnnnnnnnnnnnnnnnnnnnnnnnnnnnnnnnnnnnnnnnnnnnnnnnnnnnnnnnnnnnnnnnnnnnnnnnnnnnnnnnnnnnnnnnnnnnnnnnnnnnnnnnnnnnnnnnnnnnnnnnnnnnnnnnnnnnnnnnnnnnnnnnnnnnnnnnnnnnnnnnnnnnnnnnnnnnnnnnnnnnnnnnnnnnnnnnnnnnnnnnnnnnnnnnnnnnnnnnnnnnnnnnnnnnnnnnnnnnnnnnnnnnnnnnnnnnnnnnnnnnnnnnnnnnnnnnnnnnnnnnnnnnnnnnnnnnnnnnnnnnnnnnnnnnnnnnnnnnnnnnnnnnnnnnnnnnnnnnnnnnnnnnnnnnnnnnnnnnnnnnnnnnnnnnnnnnnnnnnnnnnnnnnnnnnnnnnnnnnnnnnnnnnnnnnnnnnnnnnnnnnnnnnnnnnnnnnnnnnnnnnnnnnnnnnnnnnnnnnnnnnnnnnnnnnnnnnnnnnnnnnnnnnnnnnnnnnnnnnnnnnnnnnnnnnnnnnnnnnnnnnnnnnnnnnnnnnnnnnnnnnnnnnnnnnnnnnnnnnnnnnnnnnnnnnnnnnnnnnnnnnnnnnnnnnnnnnnnnnnnnnnnnnnnnnnnnnnnnnnnnnnnnnnnnnnnnnnnnnnnnnnnnnnnnnnnnnnnnnnnnnnnnnnnnnnnnnnnnnnnnnnnnnnnnnnnnnnnnnnnnnnnnnnnnnnnnnnnnnnnnnnnnnnnnnnnnnnnnnnnnnnnnnnnnnnnnnnnnnnnnnnnnnnnnnnnnnnnnnnnnnnnnnnnnnnnnnnnnnnnnnnnnnnnnnnnnnnnnnnnnnnnnnnnnnnnnnnnnnnnnnnnnnnnnnnnnnnnnnnnnnnnnnnnnnnnnnnnnnnnnnnnnnnnnnnnnnnnnnnnnnnnnnnnnnnnnnnnnnnnnnnnnnnnnnnnnnnnnnnnnnnnnnnnnnnnnnnnnnnnnnnnnnnnnnnnnnnnnnnnnnnnnnnnnnnnnnnnnnnnnnnnnnnnnnnnnnnnnnnnnnnnnnnnnnnnnnnnnnnnnnnnnnnnnnnnnnnnnnnnnnnnnnnnnnnnnnnnnnnnnnnnnnnnnnnnnnnnnnnnnnnnnnnnnnnnnnnnnnnnnnnnnnnnnnnnnnnnnnnnnnnnnnnnnnnnnnnnnnnnnnnnnnnnnnnnnnnnnnnnnnnnnnnnnnnnnnnnnnnnnnnnnnnnnnnnnnnnnnnnnnnnnnnnnnnnnnnnnnnnnnnnnnnnnnnnnnnnnnnnnnnnnnnnnnnnnnnnnnnnnnnnnnnnnnnnnnnnnnnnnnnnnnnnnnnnnnnnnnnnnnnnnnnnnnnnnnnnnnnnnnnnnnnnnnnnnnnnnnnnnnnnnnnnnnnnnnnnnnnnnnnnnnnnnnnnnnnnnnnnnnnnnnnnnnnnnnnnnnnnnnnnnnnnnnnnnnnnnnnnnnnnnnnnnnnnnnnnnnnnnnnnnnnnnnnnnnnnnnnnnnnnnnnnnnnnnnnnnnnnnnnnnnnnnnnnnnnnnnnnnnnnnnnnnnnnnnnnnnnnnnnnnnnnnnnnnnnnnnnnnnnnnnnnnnnnnnnnnnnnnnnnnnnnnnnnnnnnnnnnnnnnnnnnnnnnnnnnnnnnnnnnnnnnnnnnnnnnnnnnnnnnnnnnnnnnnnnnnnnnnnnnnnnnnnnnnnnnnnnnnnnnnnnnnnnnnnnnnnnnnnnnnnnnnnnnnnnnnnnnnnnnnnnnnnnnnnnnnnnnnnnnnnnnnnnnnnnnnnnnnnnnnnnnnnnnnnnnnnnnnnnnnnnnnnnnnnnnnnnnnnnnnnnnnnnnnnnnnnnnnnnnnnnnnnnnnnnnnnnnnnnnnnnnnnnnnnnnnnnnnnnnnnnnnnnnnnnnnnnnnnnnnnnnnnnnnnnnnnnnnnnnnnnnnnnnnnnnnnnnnnnnnnnnnnnnnnnnnnnnnnnnnnnnnnnnnnnnnnnnnnnnnnnnnnnnnnnnnnnnnnnnnnnnnnnnnnnnnnnnnnnnnnnnnnnnnnnnnnnnnnnnnnnnnnnnnnnnnnnnnnnnnnnnnnnnnnnnnnnnnnnnnnnnnnnnnnnnnnnnnnnnnnnnnnnnnnnnnnnnnnnnnnnnnnnnnnnnnnnnnnnnnnnnnnnnnnnnnnnnnnnnnnnnnnnnnnnnnnnnnnnnnnnnnnnnnnnnnnnnnnnnnnnnnnnnnnnnnnnnnnnnnnnnnnnnnnnnnnnnnnnnnnnnnnnnnnnnnnnnnnnnnnnnnnnnnnnnnnnnnnnnnnnnnnnnnnnnnnnnnnnnnnnnnnnnnnnnnnnnnnnnnnnnnnnnnnnnnnnnnnnnnnnnnnnnnnnnnnnnnnnnnnnnnnnnnnnnnnnnnnnnnnnnnnnnnnnnnnnnnnnnnnnnnnnnnnnnnnnnnnnnnnnnnnnnnnnnnnnnnnnnnnnnnnnnnnnnnnnnnnnnnnnnnnnnnnnnnnnnnnnnnnnnnnnnnnnnnnnnnnnnnnnnnnnnnnnnnnnnnnnnnnnnnnnnnnnnnnnnnnnnnnnnnnnnnnnnnnnnnnnnnnnnnnnnnnnnnnnnnnnnnnnnnnnnnnnnnnnnnnnnnnnnnnnnnnnnnnnnnnnnnnnnnnnnnnnnnnnnnnnnnnnnnnnnnnnnnnnnnnnnnnnnnnnnnnnnnnnnnnnnnnnnnnnnnnnnnnnnnnnnnnnnnnnnnnnnnnnnnnnnnnnnnnnnnnnnnnnnnnnnnnnnnnnnnnnnnnnnnnnnnnnnnnnnnnnnnnnnnnnnnnnnnnnnnnnnnnnnnnnnnnnnnnnnnnnnnnnnnnnnnnnnnnnnnnnnnnnnnnnnnnnnnnnnnnnnnnnnnnnnnnnnnnnnnnnnnnnnnnnnnnnnnnnnnnnnnnnnnnnnnnnnnnnnnnnnnnnnnnnnnnnnnnnnnnnnnnnnnnnnnnnnnnnnnnnnnnnnnnnnnnnnnnnnnnnnnnnnnnnnnnnnnnnnnnnnnnnnnnnnnnnnnnnnnnnnnnnnnnnnnnnnnnnnnnnnnnnnnnnnnnnnnnnnnnnnnnnnnnnnnnnnnnnnnnnnnnnnnnnnnnnnnnnnnnnnnnnnnnnnnnnnnnnnnnnnnnnnnnnnnnnnnnnnnnnnnnnnnnnnnnnnnnnnnnnnnnnnnnnnnnnnnnnnnnnnnnnnnnnnnnnnnnnnnnnnnnnnnnnnnnnnnnnnnnnnnnnnnnnnnnnnnnnnnnnnnnnnnnnnnnnnnnnnnnnnnnnnnnnnnnnnnnnnnnnnnnnnnnnnnnnnnnnnnnnnnnnnnnnnnnnnnnnnnnnnnnnnnnnnnnnnnnnnnnnnnnnnnnnnnnnnnnnnnnnnnnnnnnnnnnnnnnnnnnnnnnnnnnnnnnnnnnnnnnnnnnnnnnnnnnnnnnnnnnnnnnnnnnnnnnnnnnnnnnnnnnnnnnnnnnnnnnnnnnnnnnnnnnnnnnnnnnnnnnnnnnnnnnnnnnnnnnnnnnnnnnnnnnnnnnnnnnnnnnnnnnnnnnnnnnnnnnnnnnnnnnnnnnnnnnnnnnnnnnnnnnnnnnnnnnnnnnnnnnnnnnnnnnnnnnnnnnnnnnnnnnnnnnnnnnnnnnnnnnnnnnnnnnnnnnnnnnnnnnnnnnnnnnnnnnnnnnnnnnnnnnnnnnnnnnnnnnnnnnnnnnnnnnnnnnnnnnnnnnnnnnnnnnnnnnnnnnnnnnnnnnnnnnnnnnnnnnnnnnnnnnnnnnnnnnnnnnnnnnnnnnnnnnnnnnnnnnnnnnnnnnnnnnnnnnnnnnnnnnnnnnnnnnnnnnnnnnnnnnnnnnnnnnnnnnnnnnnnnnnnnnnnnnnnnnnnnnnnnnnnnnnnnnnnnnnnnnnnnnnnnnnnnnnnnnnnnnnnnnnnnnnnnnnnnnnnnnnnnnnnnnnnnnnnnnnnnnnnnnnnnnnnnnnnnnnnnnnnnnnnnnnnnnnnnnnnnnnnnnnnnnnnnnnnnnnnnnnnnnnnnnnnnnnnnnnnnnnnnnnnnnnnnnnnnnnnnnnnnnnnnnnnnnnnnnnnnnnnnnnnnnnnnnnnnnnnnnnnnnnnnnnnnnnnnnnnnnnnnnnnnnnnnnnnnnnnnnnnnnnnnnnnnnnnnnnnnnnnnnnnnnnnnnnnnnnnnnnnnnnnnnnnnnnnnnnnnnnnnnnnnnnnnnnnnnnnnnnnnnnnnnnnnnnnnnnnnnnnnnnnnnnnnnnnnnnnnnnnnnnnnnnnnnnnnnnnnnnnnnnnnnnnnnnnnnnnnnnnnnnnnnnnnnnnnnnnnnnnnnnnnnnnnnnnnnnnnnnnnnnnnnnnnnnnnnnnnnnnnnnnnnnnnnnnnnnnnnnnnnnnnnnnnnnnnnnnnnnnnnnnnnnnnnnnnnnnnnnnnnnnnnnnnnnnnnnnnnnnnnnnnnnnnnnnnnnnnnnnnnnnnnnnnnnnnnnnnnnnnnnnnnnnnnnnnnnnnnnnnnnnnnnnnnnnnnnnnnnnnnnnnnnnnnnnnnnnnnnnnnnnnnnnnnnnnnnnnnnnnnnnnnnnnnnnnnnnnnnnnnnnnnnnnnnnnnnnnnnnnnnnnnnnnnnnnnnnnnnnnnnnnnnnnnnnnnnnnnnnnnnnnnnnnnnnnnnnnnnnnnnnnnnnnnnnnnnnnnnnnnnnnnnnnnnnnnnnnnnnnnnnnnnnnnnnnnnnnnnnnnnnnnnnnnnnnnnnnnnnnnnnnnnnnnnnnnnnnnnnnnnnnnnnnnnnnnnnnnnnnnnnnnnnnnnnnnnnnnnnnnnnnnnnnnnnnnnnnnnnnnnnnnnnnnnnnnnnnnnnnnnnnnnnnnnnnnnnnnnnnnnnnnnnnnnnnnnnnnnnnnnnnnnnnnnnnnnnnnnnnnnnnnnnnnnnnnnnnnnnnnnnnnnnnnnnnnnnnnnnnnnnnnnnnnnnnnnnnnnnnnnnnnnnnnnnnnnnnnnnnnnnnnnnnnnnnnnnnnnnnnnnnnnnnnnnnnnnnnnnnnnnnnnnnnnnnnnnnnnnnnnnnnnnnnnnnnnnnnnnnnnnnnnnnnnnnnnnnnnnnnnnnnnnnnnnnnnnnnnnnnnnnnnnnnnnnnnnnnnnnnnnnnnnnnnnnnnnnnnnnnnnnnnnnnnnnnnnnnnnnnnnnnnnnnnnnnnnnnnnnnnnnnnnnnnnnnnnnnnnnnnnnnnnnnnnnnnnnnnnnnnnnnnnnnnnnnnnnnnnnnnnnnnnnnnnnnnnnnnnnnnnnnnnnnnnnnnnnnnnnnnnnnnnnnnnnnnnnnnnnnnnnnnnnnnnnnnnnnnnnnnnnnnnnnnnnnnnnnnnnnnnnnnnnnnnnnnnnnnnnnnnnnnnnnnnnnnnnnnnnnnnnnnnnnnnnnnnnnnnnnnnnnnnnnnnnnnnnnnnnnnnnnnnnnnnnnnnnnnnnnnnnnnnnnnnnnnnnnnnnnnnnnnnnnnnnnnnnnnnnnnnnnnnnnnnnnnnnnnnnnnnnnnnnnnnnnnnnnnnnnnnnnnnnnnnnnnnnnnnnnnnnnnnnnnnnnnnnnnnnnnnnnnnnnnnnnnnnnnnnnnnnnnnnnnnnnnnnnnnnnnnnnnnnnnnnnnnnnnnnnnnnnnnnnnnnnnnnnnnnnnnnnnnnnnnnnnnnnnnnnnnnnnnnnnnnnnnnnnnnnnnnnnnnnnnnnnnnnnnnnnnnnnnnnnnnnnnnnnnnnnnnnnnnnnnnnnnnnnnnnnnnnnnnnnnnnnnnnnnnnnnnnnnnnnnnnnnnnnnnnnnnnnnnnnnnnnnnnnnnnnnnnnnnnnnnnnnnnnnnnnnnnnnnnnnnnnnnnnnnnnnnnnnnnnnnnnnnnnnnnnnnnnnnnnnnnnnnnnnnnnnnnnnnnnnnnnnnnnnnnnnnnnnnnnnnnnnnnnnnnnnnnnnnnnnnnnnnnnnnnnnnnnnnnnnnnnnnnnnnnnnnnnnnnnnnnnnnnnnnnnnnnnnnnnnnnnnnnnnnnnnnnnnnnnnnnnnnnnnnnnnnnnnnnnnnnnnnnnnnnnnnnnnnnnnnnnnnnnnnnnnnnnnnnnnnnnnnnnnnnnnnnnnnnnnnnnnnnnnnnnnnnnnnnnnnnnnnnnnnnnnnnnnnnnnnnnnnnnnnnnnnnnnnnnnnnnnnnnnnnnnnnnnnnnnnnnnnnnnnnnnnnnnnnnnnnnnnnnnnnnnnnnnnnnnnnnnnnnnnnnnnnnnnnnnnnnnnnnnnnnnnnnnnnnnnnnnnnnnnnnnnnnnnnnnnnnnnnnnnnnnnnnnnnnnnnnnnnnnnnnnnnnnnnnnnnnnnnnnnnnnnnnnnnnnnnnnnnnnnnnnnnnnnnnnnnnnnnnnnnnnnnnnnnnnnnnnnnnnnnnnnnnnnnnnnnnnnnnnnnnnnnnnnnnnnnnnnnnnnnnnnnnnnnnnnnnnnnnnnnnnnnnnnnnnnnnnnnnnnnnnnnnnnnnnnnnnnnnnnnnnnnnnnnnnnnnnnnnnnnnnnnnnnnnnnnnnnnnnnnnnnnnnnnnnnnnnnnnnnnnnnnnnnnnnnnnnnnnnnnnnnnnnnnnnnnnnnnnnnnnnnnnnnnnnnnnnnnnnnnnnnnnnnnnnnnnnnnnnnnnnnnnnnnnnnnnnnnnnnnnnnnnnnnnnnnnnnnnnnnnnnnnnnnnnnnnnnnnnnnnnnnnnnnnnnnnnnnnnnnnnnnnnnnnnnnnnnnnnnnnnnnnnnnnnnnnnnnnnnnnnnnnnnnnnnnnnnnnnnnnnnnnnnnnnnnnnnnnnnnnnnnnnnnnnnnnnnnnnnnnnnnnnnnnnnnnnnnnnnnnnnnnnnnnnnnnnnnnnnnnnnnnnnnnnnnnnnnnnnnnnnnnnnnnnnnnnnnnnnnnnnnnnnnnnnnnnnnnnnnnnnnnnnnnnnnnnnnnnnnnnnnnnnnnnnnnnnnnnnnnnnnnnnnnnnnnnnnnnnnnnnnnnnnnnnnnnnnnnnnnnnnnnnnnnnnnnnnnnnnnnnnnnnnnnnnnnnnnnnnnnnnnnnnnnnnnnnnnnnnnnnnnnnnnnnnnnnnnnnnnnnnnnnnnnnnnnnnnnnnnnnnnnnnnnnnnnnnnnnnnnnnnnnnnnnnnnnnnnnnnnnnnnnnnnnnnnnnnnnnnnnnnnnnnnnnnnnnnnnnnnnnnnnnnnnnnnnnnnnnnnnnnnnnnnnnnnnnnnnnnnnnnnnnnnnnnnnnnnnnnnnnnnnnnnnnnnnnnnnnnnnnnnnnnnnnnnnnnnnnnnnnnnnnnnnnnnnnnnnnnnnnnnnnnnnnnnnnnnnnnnnnnnnnnnnnnnnnnnnnnnnnnnnnnnnnnnnnnnnnnnnnnnnnnnnnnnnnnnnnnnnnnnnnnnnnnnnnnnnnnnnnnnnnnnnnnnnnnnnnnnnnnnnnnnnnnnnnnnnnnnnnnnnnnnnnnnnnnnnnnnnnnnnnnnnnnnnnnnnnnnnnnnnnnnnnnnnnnnnnnnnnnnnnnnnnnnnnnnnnnnnnnnnnnnnnnnnnnnnnnnnnnnnnnnnnnnnnnnnnnnnnnnnnnnnnnnnnnnnnnnnnnnnnnnnnnnnnnnnnnnnnnnnnnnnnnnnnnnnnnnnnnnnnnnnnnnnnnnnnnnnnnnnnnnnnnnnnnnnnnnnnnnnnnnnnnnnnnnnnnnnnnnnnnnnnnnnnnnnnnnnnnnnnnnnnnnnnnnnnnnnnnnnnnnnnnnnnnnnnnnnnnnnnnnnnnnnnnnnnnnnnnnnnnnnnnnnnnnnnnnnnnnnnnnnnnnnnnnnnnnnnnnnnnnnnnnnnnnnnnnnnnnnnnnnnnnnnnnnnnnnnnnnnnnnnnnnnnnnnnnnnnnnnnnnnnnnnnnnnnnnnnnnnnnnnnnnnnnnnnnnnnnnnnnnnnnnnnnnnnnnnnnnnnnnnnnnnnnnnnnnnnnnnnnnnnnnnnnnnnnnnnnnnnnnnnnnnnnnnnnnnnnnnnnnnnnnnnnnnnnnnnnnnnnnnnnnnnnnnnnnnnnnnnnnnnnnnnnnnnnnnnnnnnnnnnnnnnnnnnnnnnnnnnnnnnnnnnnnnnnnnnnnnnnnnnnnnnnnnnnnnnnnnnnnnnnnnnnnnnnnnnnnnnnnnnnnnnnnnnnnnnnnnnnnnnnnnnnnnnnnnnnnnnnnnnnnnnnnnnnnnnnnnnnnnnnnnnnnnnnnnnnnnnnnnnnnnnnnnnnnnnnnnnnnnnnnnnnnnnnnnnnnnnnnnnnnnnnnnnnnnnnnnnnnnnnnnnnnnnnnnnnnnnnnnnnnnnnnnnnnnnnnnnnnnnnnnnnnnnnnnnnnnnnnnnnnnnnnnnnnnnnnnnnnnnnnnnnnnnnnnnnnnnnnnnnnnnnnnnnnnnnnnnnnnnnnnnnnnnnnnnnnnnnnnnnnnnnnnnnnnnnnnnnnnnnnnnnnnnnnnnnnnnnnnnnnnnnnnnnnnnnnnnnnnnnnnnnnnnnnnnnnnnnnnnnnnnnnnnnnnnnnnnnnnnnnnnnnnnnnnnnnnnnnnnnnnnnnnnnnnnnnnnnnnnnnnnnnnnnnnnnnnnnnnnnnnnnnnnnnnnnnnnnnnnnnnnnnnnnnnnnnnnnnnnnnnnnnnnnnnnnnnnnnnnnnnnnnnnnnnnnnnnnnnnnnnnnnnnnnnnnnnnnnnnnnnnnnnnnnnnnnnnnnnnnnnnnnnnnnnnnnnnnnnnnnnnnnnnnnnnnnnnnnnnnnnnnnnnnnnnnnnnnnnnnnnnnnnnnnnnnnnnnnnnnnnnnnnnnnnnnnnnnnnnnnnnnnnnnnnnnnnnnnnnnnnnnnnnnnnnnnnnnnnnnnnnnnnnnnnnnnnnnnnnnnnnnnnnnnnnnnnnnnnnnnnnnnnnnnnnnnnnnnnnnnnnnnnnnnnnnnnnnnnnnnnnnnnnnnnnnnnnnnnnnnnnnnnnnnnnnnnnnnnnnnnnnnnnnnnnnnnnnnnnnnnnnnnnnnnnnnnnnnnnnnnnnnnnnnnnnnnnnnnnnnnnnnnnnnnnnnnnnnnnnnnnnnnnnnnnnnnnnnnnnnnnnnnnnnnnnnnnnnnnnnnnnnnnnnnnnnnnnnnnnnnnnnnnnnnnnnnnnnnnnnnnnnnnnnnnnnnnnnnnnnnnnnnnnnnnnnnnnnnnnnnnnnnnnnnnnnnnnnnnnnnnnnnnnnnnnnnnnnnnnnnnnnnnnnnnnnnnnnnnnnnnnnnnnnnnnnnnnnnnnnnnnnnnnnnnnnnnnnnnnnnnnnnnnnnnnnnnnnnnnnnnnnnnnnnnnnnnnnnnnnnnnnnnnnnnnnnnnnnnnnnnnnnnnnnnnnnnnnnnnnnnnnnnnnnnnnnnnnnnnnnnnnnnnnnnnnnnnnnnnnnnnnnnnnnnnnnnnnnnnnnnnnnnnnnnnnnnnnnnnnnnnnnnnnnnnnnnnnnnnnnnnnnnnnnnnnnnnnnnnnnnnnnnnnnnnnnnnnnnnnnnnnnnnnnnnnnnnnnnnnnnnnnnnnnnnnnnnnnnnnnnnnnnnnnnnnnnnnnnnnnnnnnnnnnnnnnnnnnnnnnnnnnnnnnnnnnnnnnnnnnnnnnnnnnnnnnnnnnnnnnnnnnnnnnnnnnnnnnnnnnnnnnnnnnnnnnnnnnnnnnnnnnnnnnnnnnnnnnnnnnnnnnnnnnnnnnnnnnnnnnnnnnnnnnnnnnnnnnnnnnnnnnnnnnnnnnnnnnnnnnnnnnnnnnnnnnnnnnnnnnnnnnnnnnnnnnnnnnnnnnnnnnnnnnnnnnnnnnnnnnnnnnnnnnnnnnnnnnnnnnnnnnnnnnnnnnnnnnnnnnnnnnnnnnnnnnnnnnnnnnnnnnnnnnnnnnnnnnnnnnnnnnnnnnnnnnnnnnnnnnnnnnnnnnnnnnnnnnnnnnnnnnnnnnnnnnnnnnnnnnnnnnnnnnnnnnnnnnnnnnnnnnnnnnnnnnnnnnnnnnnnnnnnnnnnnnnnnnnnnnnnnnnnnnnnnnnnnnnnnnnnnnnnnnnnnnnnnnnnnnnnnnnnnnnnnnnnnnnnnnnnnnnnnnnnnnnnnnnnnnnnnnnnnnnnnnnnnnnnnnnnnnnnnnnnnnnnnnnnnnnnnnnnnnnnnnnnnnnnnnnnnnnnnnnnnnnnnnnnnnnnnnnnnnnnnnnnnnnnnnnnnnnnnnnnnnnnnnnnnnnnnnnnnnnnnnnnnnnnnnnnnnnnnnnnnnnnnnnnnnnnnnnnnnnnnnnnnnnnnnnnnnnnnnnnnnnnnnnnnnnnnnnnnnnnnnnnnnnnnnnnnnnnnnnnnnnnnnnnnnnnnnnnnnnnnnnnnnnnnnnnnnnnnnnnnnnnnnnnnnnnnnnnnnnnnnnnnnnnnnnnnnnnnnnnnnnnnnnnnnnnnnnnnnnnnnnnnnnnnnnnnnnnnnnnnnnnnnnnnnnnnnnnnnnnnnnnnnnnnnnnnnnnnnnnnnnnnnnnnnnnnnnnnnnnnnnnnnnnnnnnnnnnnnnnnnnnnnnnnnnnnnnnnnnnnnnnnnnnnnnnnnnnnnnnnnnnnnnnnnnnnnnnnnnnnnnnnnnnnnnnnnnnnnnnnnnnnnnnnnnnnnnnnnnnnnnnnnnnnnnnnnnnnnnnnnnnnnnnnnnnnnnnnnnnnnnnnnnnnnnnnnnnnnnnnnnnnnnnnnnnnnnnnnnnnnnnnnnnnnnnnnnnnnnnnnnnnnnnnnnnnnnnnnnnnnnnnnnnnnnnnnnnnnnnnnnnnnnnnnnnnnnnnnnnnnnnnnnnnnnnnnnnnnnnnnnnnnnnnnnnnnnnnnnnnnnnnnnnnnnnnnnnnnnnnnnnnnnnnnnnnnnnnnnnnnnnnnnnnnnnnnnnnnnnnnnnnnnnnnnnnnnnnnnnnnnnnnnnnnnnnnnnnnnnnnnnnnnnnnnnnnnnnnnnnnnnnnnnnnnnnnnnnnnnnnnnnnnnnnnnnnnnnnnnnnnnnnnnnnnnnnnnnnnnnnnnnnnnnnnnnnnnnnnnnnnnnnnnnnnnnnnnnnnnnnnnnnnnnnnnnnnnnnnnnnnnnnnnnnnnnnnnnnnnnnnnnnnnnnnnnnnnnnnnnnnnnnnnnnnnnnnnnnnnnnnnnnnnnnnnnnnnnnnnnnnnnnnnnnnnnnnnnnnnnnnnnnnnnnnnnnnnnnnnnnnnnnnnnnnnnnnnnnnnnnnnnnnnnnnnnnnnnnnnnnnnnnnnnnnnnnnnnnnnnnnnnnnnnnnnnnnnnnnnnnnnnnnnnnnnnnnnnnnnnnnnnnnnnnnnnnnnnnnnnnnnnnnnnnnnnnnnnnnnnnnnnnnnnnnnnnnnnnnnnnnnnnnnnnnnnnnnnnnnnnnnnnnnnnnnnnnnnnnnnnnnnnnnnnnnnnnnnnnnnnnnnnnnnnnnnnnnnnnnnnnnnnnnnnnnnnnnnnnnnnnnnnnnnnnnnnnnnnnnnnnnnnnnnnnnnnnnnnnnnnnnnnnnnnnnnnnnnnnnnnnnnnnnnnnnnnnnnnnnnnnnnnnnnnnnnnnnnnnnnnnnnnnnnnnnnnnnnnnnnnnnnnnnnnnnnnnnnnnnnnnnnnnnnnnnnnnnnnnnnnnnnnnnnnnnnnnnnnnnnnnnnnnnnnnnnnnnnnnnnnnnnnnnnnnnnnnnnnnnnnnnnnnnnnnnnnnnnnnnnnnnnnnnnnnnnnnnnnnnnnnnnnnnnnnnnnnnnnnnnnnnnnnnnnnnnnnnnnnnnnnnnnnnnnnnnnnnnnnnnnnnnnnnnnnnnnnnnnnnnnnnnnnnnnnnnnnnnnnnnnnnnnnnnnnnnnnnnnnnnnnnnnnnnnnnnnnnnnnnnnnnnnnnnnnnnnnnnnnnnnnnnnnnnnnnnnnnnnnnnnnnnnnnnnnnnnnnnnnnnnnnnnnnnnnnnnnnnnnnnnnnnnnnnnnnnnnnnnnnnnnnnnnnnnnnnnnnnnnnnnnnnnnnnnnnnnnnnnnnnnnnnnnnnnnnnnnnnnnnnnnnnnnnnnnnnnnnnnnnnnnnnnnnnnnnnnnnnnnnnnnnnnnnnnnnnnnnnnnnnnnnnnnnnnnnnnnnnnnnnnnnnnnnnnnnnnnnnnnnnnnnnnnnnnnnnnnnnnnnnnnnnnnnnnnnnnnnnnnnnnnnnnnnnnnnnnnnnnnnnnnnnnnnnnnnnnnnnnnnnnnnnnnnnnnnnnnnnnnnnnnnnnnnnnnnnnnnnnnnnnnnnnnnnnnnnnnnnnnnnnnnnnnnnnnnnnnnnnnnnnnnnnnnnnnnnnnnnnnnnnnnnnnnnnnnnnnnnnnnnnnnnnnnnnnnnnnnnnnnnnnnnnnnnnnnnnnnnnnnnnnnnnnnnnnnnnnnnnnnnnnnnnnnnnnnnnnnnnnnnnnnnnnnnnnnnnnnnnnnnnnnnnnnnnnnnnnnnnnnnnnnnnnnnnnnnnnnnnnnnnnnnnnnnnnnnnnnnnnnnnnnnnnnnnnnnnnnnnnnnnnnnnnnnnnnnnnnnnnnnnnnnnnnnnnnnnnnnnnnnnnnnnnnnnnnnnnnnnnnnnnnnnnnnnnnnnnnnnnnnnnnnnnnnnnnnnnnnnnnnnnnnnnnnnnnnnnnnnnnnnnnnnnnnnnnnnnnnnnnnnnnnnnnnnnnnnnnnnnnnnnnnnnnnnnnnnnnnnnnnnnnnnnnnnnnnnnnnnnnnnnnnnnnnnnnnnnnnnnnnnnnnnnnnnnnnnnnnnnnnnnnnnnnnnnnnnnnnnnnnnnnnnnnnnnnnnnnnnnnnnnnnnnnnnnnnnnnnnnnnnnnnnnnnnnnnnnnnnnnnnnnnnnnnnnnnnnnnnnnnnnnnnnnnnnnnnnnnnnnnnnnnnnnnnnnnnnnnnnnnnnnnnnnnnnnnnnnnnnnnnnnnnnnnnnnnnnnnnnnnnnnnnnnnnnnnnnnnnnnnnnnnnnnnnnnnnnnnnnnnnnnnnnnnnnnnnnnnnnnnnnnnnnnnnnnnnnnnnnnnnnnnnnnnnnnnnnnnnnnnnnnnnnnnnnnnnnnnnnnnnnnnnnnnnnnnnnnnnnnnnnnnnnnnnnnnnnnnnnnnnnnnnnnnnnnnnnnnnnnnnnnnnnnnnnnnnnnnnnnnnnnnnnnnnnnnnnnnnnnnnnnnnnnnnnnnnnnnnnnnnnnnnnnnnnnnnnnnnnnnnnnnnnnnnnnnnnnnnnnnnnnnnnnnnnnnnnnnnnnnnnnnnnnnnnnnnnnnnnnnnnnnnnnnnnnnnnnnnnnnnnnnnnnnnnnnnnnnnnnnnnnnnnnnnnnnnnnnnnnnnnnnnnnnnnnnnnnnnnnnnnnnnnnnnnnnnnnnnnnnnnnnnnnnnnnnnnnnnnnnnnnnnnnnnnnnnnnnnnnnnnnnnnnnnnnnnnnnnnnnnnnnnnnnnnnnnnnnnnnnnnnnnnnnnnnnnnnnnnnnnnnnnnnnnnnnnnnnnnnnnnnnnnnnnnnnnnnnnnnnnnnnnnnnnnnnnnnnnnnnnnnnnnnnnnnnnnnnnnnnnnnnnnnnnnnnnnnnnnnnnnnnnnnnnnnnnnnnnnnnnnnnnnnnnnnnnnnnnnnnnnnnnnnnnnnnnnnnnnnnnnnnnnnnnnnnnnnnnnnnnnnnnnnnnnnnnnnnnnnnnnnnnnnnnnnnnnnnnnnnnnnnnnnnnnnnnnnnnnnnnnnnnnnnnnnnnnnnnnnnnnnnnnnnnnnnnnnnnnnnnnnnnnnnnnnnnnnnnnnnnnnnnnnnnnnnnnnnnnnnnnnnnnnnnnnnnnnnnnnnnnnnnnnnnnnnnnnnnnnnnnnnnnnnnnnnnnnnnnnnnnnnnnnnnnnnnnnnnnnnnnnnnnnnnnnnnnnnnnnnnnnnnnnnnnnnnnnnnnnnnnnnnnnnnnnnnnnnnnnnnnnnnnnnnnnnnnnnnnnnnnnnnnnnnnnnnnnnnnnnnnnnnnnnnnnnnnnnnnnnnnnnnnnnnnnnnnnnnnnnnnnnnnnnnnnnnnnnnnnnnnnnnnnnnnnnnnnnnnnnnnnnnnnnnnnnnnnnnnnnnnnnnnnnnnnnnnnnnnnnnnnnnnnnnnnnnnnnnnnnnnnnnnnnnnnnnnnnnnnnnnnnnnnnnnnnnnnnnnnnnnnnnnnnnnnnnnnnnnnnnnnnnnnnnnnnnnnnnnnnnnnnnnnnnnnnnnnnnnnnnnnnnnnnnnnnnnnnnnnnnnnnnnnnnnnnnnnnnnnnnnnnnnnnnnnnnnnnnnnnnnnnnnnnnnnnnnnnnnnnnnnnnnnnnnnnnnnnnnnnnnnnnnnnnnnnnnnnnnnnnnnnnnnnnnnnnnnnnnnnnnnnnnnnnnnnnnnnnnnnnnnnnnnnnnnnnnnnnnnnnnnnnnnnnnnnnnnnnnnnnnnnnnnnnnnnnnnnnnnnnnnnnnnnnnnnnnnnnnnnnnnnnnnnnnnnnnnnnnnnnnnnnnnnnnnnnnnnnnnnnnnnnnnnnnnnnnnnnnnnnnnnnnnnnnnnnnnnnnnnnnnnnnnnnnnnnnnnnnnnnnnnnnnnnnnnnnnnnnnnnnnnnnnnnnnnnnnnnnnnnnnnnnnnnnnnnnnnnnnnnnnnnnnnnnnnnnnnnnnnnnnnnnnnnnnnnnnnnnnnnnnnnnnnnnnnnnnnnnnnnnnnnnnnnnnnnnnnnnnnnnnnnnnnnnnnnnnnnnnnnnnnnnnnnnnnnnnnnnnnnnnnnnnnnnnnnnnnnnnnnnnnnnnnnnnnnnnnnnnnnnnnnnnnnnnnnnnnnnnnnnnnnnnnnnnnnnnnnnnnnnnnnnnnnnnnnnnnnnnnnnnnnnnnnnnnnnnnnnnnnnnnnnnnnnnnnnnnnnnnnnnnnnnnnnnnnnnnnnnnnnnnnnnnnnnnnnnnnnnnnnnnnnnnnnnnnnnnnnnnnnnnnnnnnnnnnnnnnnnnnnnnnnnnnnnnnnnnnnnnnnnnnnnnnnnnnnnnnnnnnnnnnnnnnnnnnnnnnnnnnnnnnnnnnnnnnnnnnnnnnnnnnnnnnnnnnnnnnnnnnnnnnnnnnnnnnnnnnnnnnnnnnnnnnnnnnnnnnnnnnnnnnnnnnnnnnnnnnnnnnnnnnnnnnnnnnnnnnnnnnnnnnnnnnnnnnnnnnnnnnnnnnnnnnnnnnnnnnnnnnnnnnnnnnnnnnnnnnnnnnnnnnnnnnnnnnnnnnnnnnnnnnnnnnnnnnnnnnnnnnnnnnnnnnnnnnnnnnnnnnnnnnnnnnnnnnnnnnnnnnnnnnnnnnnnnnnnnnnnnnnnnnnnnnnnnnnnnnnnnnnnnnnnnnnnnnnnnnnnnnnnnnnnnnnnnnnnnnnnnnnnnnnnnnnnnnnnnnnnnnnnnnnnnnnnnnnnnnnnnnnnnnnnnnnnnnnnnnnnnnnnnnnnnnnnnnnnnnnnnnnnnnnnnnnnnnnnnnnnnnnnnnnnnnnnnnnnnnnnnnnnnnnnnnnnnnnnnnnnnnnnnnnnnnnnnnnnnnnnnnnnnnnnnnnnnnnnnnnnnnnnnnnnnnnnnnnnnnnnnnnnnnnnnnnnnnnnnnnnnnnnnnnnnnnnnnnnnnnnnnnnnnnnnnnnnnnnnnnnnnnnnnnnnnnnnnnnnnnnnnnnnnnnnnnnnnnnnnnnnnnnnnnnnnnnnnnnnnnnnnnnnnnnnnnnnnnnnnnnnnnnnnnnnnnnnnnnnnnnnnnnnnnnnnnnnnnnnnnnnnnnnnnnnnnnnnnnnnnnnnnnnnnnnnnnnnnnnnnnnnnnnnnnnnnnnnnnnnnnnnnnnnnnnnnnnnnnnnnnnnnnnnnnnnnnnnnnnnnnnnnnnnnnnnnnnnnnnnnnnnnnnnnnnnnnnnnnnnnnnnnnnnnnnnnnnnnnnnnnnnnnnnnnnnnnnnnnnnnnnnnnnnnnnnnnnnnnnnnnnnnnnnnnnnnnnnnnnnnnnnnnnnnnnnnnnnnnnnnnnnnnnnnnnnnnnnnnnnnnnnnnnnnnnnnnnnnnnnnnnnnnnnnnnnnnnnnnnnnnnnnnnnnnnnnnnnnnnnnnnnnnnnnnnnnnnnnnnnnnnnnnnnnnnnnnnnnnnnnnnnnnnnnnnnnnnnnnnnnnnnnnnnnnnnnnnnnnnnnnnnnnnnnnnnnnnnnnnnnnnnnnnnnnnnnnnnnnnnnnnnnnnnnnnnnnnnnnnnnnnnnnnnnnnnnnnnnnnnnnnnnnnnnnnnnnnnnnnnnnnnnnnnnnnnnnnnnnnnnnnnnnnnnnnnnnnnnnnnnnnnnnnnnnnnnnnnnnnnnnnnnnnnnnnnnnnnnnnnnnnnnnnnnnnnnnnnnnnnnnnnnnnnnnnnnnnnnnnnnnnnnnnnnnnnnnnnnnnnnnnnnnnnnnnnnnnnnnnnnnnnnnnnnnnnnnnnnnnnnnnnnnnnnnnnnnnnnnnnnnnnnnnnnnnnnnnnnnnnnnnnnnnnnnnnnnnnnnnnnnnnnnnnnnnnnnnnnnnnnnnnnnnnnnnnnnnnnnnnnnnnnnnnnnnnnnnnnnnnnnnnnnnnnnnnnnnnnnnnnnnnnnnnnnnnnnnnnnnnnnnnnnnnnnnnnnnnnnnnnnnnnnnnnnnnnnnnnnnnnnnnnnnnnnnnnnnnnnnnnnnnnnnnnnnnnnnnnnnnnnnnnnnnnnnnnnnnnnnnnnnnnnnnnnnnnnnnnnnnnnnnnnnnnnnnnnnnnnnnnnnnnnnnnnnnnnnnnnnnnnnnnnnnnnnnnnnnnnnnnnnnnnnnnnnnnnnnnnnnnnnnnnnnnnnnnnnnnnnnnnnnnnnnnnnnnnnnnnnnnnnnnnnnnnnnnnnnnnnnnnnnnnnnnnnnnnnnnnnnnnnnnnnnnnnnnnnnnnnnnnnnnnnnnnnnnnnnnnnnnnnnnnnnnnnnnnnnnnnnnnnnnnnnnnnnnnnnnnnnnnnnnnnnnnnnnnnnnnnnnnnnnnnnnnnnnnnnnnnnnnnnnnnnnnnnnnnnnnnnnnnnnnnnnnnnnnnnnnnnnnnnnnnnnnnnnnnnnnnnnnnnnnnnnnnnnnnnnnnnnnnnnnnnnnnnnnnnnnnnnnnnnnnnnnnnnnnnnnnnnnnnnnnnnnnnnnnnnnnnnnnnnnnnnnnnnnnnnnnnnnnnnnnnnnnnnnnnnnnnnnnnnnnnnnnnnnnnnnnnnnnnnnnnnnnnnnnnnnnnnnnnnnnnnnnnnnnnnnnnnnnnnnnnnnnnnnnnnnnnnnnnnnnnnnnnnnnnnnnnnnnnnnnnnnnnnnnnnnnnnnnnnnnnnnnnnnnnnnnnnnnnnnnnnnnnnnnnnnnnnnnnnnnnnnnnnnnnnnnnnnnnnnnnnnnnnnnnnnnnnnnnnnnnnnnnnnnnnnnnnnnnnnnnnnnnnnnnnnnnnnnnnnnnnnnnnnnnnnnnnnnnnnnnnnnnnnnnnnnnnnnnnnnnnnnnnnnnnnnnnnnnnnnnnnnnnnnnnnnnnnnnnnnnnnnnnnnnnnnnnnnnnnnnnnnnnnnnnnnnnnnnnnnnnnnnnnnnnnnnnnnnnnnnnnnnnnnnnnnnnnnnnnnnnnnnnnnnnnnnnnnnnnnnnnnnnnnnnnnnnnnnnnnnnnnnnnnnnnnnnnnnnnnnnnnnnnnnnnnnnnnnnnnnnnnnnnnnnnnnnnnnnnnnnnnnnnnnnnnnnnnnnnnnnnnnnnnnnnnnnnnnnnnnnnnnnnnnnnnnnnnnnnnnnnnnnnnnnnnnnnnnnnnnnnnnnnnnnnnnnnnnnnnnnnnnnnnnnnnnnnnnnnnnnnnnnnnnnnnnnnnnnnnnnnnnnnnnnnnnnnnnnnnnnnnnnnnnnnnnnnnnnnnnnnnnnnnnnnnnnnnnnnnnnnnnnnnnnnnnnnnnnnnnnnnnnnnnnnnnnnnnnnnnnnnnnnnnnnnnnnnnnnnnnnnnnnnnnnnnnnnnnnnnnnnnnnnnnnnnnnnnnnnnnnnnnnnnnnnnnnnnnnnnnnnnnnnnnnnnnnnnnnnnnnnnnnnnnnnnnnnnnnnnnnnnnnnnnnnnnnnnnnnnnnnnnnnnnnnnnnnnnnnnnnnnnnnnnnnnnnnnnnnnnnnnnnnnnnnnnnnnnnnnnnnnnnnnnnnnnnnnnnnnnnnnnnnnnnnnnnnnnnnnnnnnnnnnnnnnnnnnnnnnnnnnnnnnnnnnnnnnnnnnnnnnnnnnnnnnnnnnnnnnnnnnnnnnnnnnnnnnnnnnnnnnnnnnnnnnnnnnnnnnnnnnnnnnnnnnnnnnnnnnnnnnnnnnnnnnnnnnnnnnnnnnnnnnnnnnnnnnnnnnnnnnnnnnnnnnnnnnnnnnnnnnnnnnnnnnnnnnnnnnnnnnnnnnnnnnnnnnnnnnnnnnnnnnnnnnnnnnnnnnnnnnnnnnnnnnnnnnnnnnnnnnnnnnnnnnnnnnnnnnnnnnnnnnnnnnnnnnnnnnnnnnnnnnnnnnnnnnnnnnnnnnnnnnnnnnnnnnnnnnnnnnnnnnnnnnnnnnnnnnnnnnnnnnnnnnnnnnnnnnnnnnnnnnnnnnnnnnnnnnnnnnnnnnnnnnnnnnnnnnnnnnnnnnnnnnnnnnnnnnnnnnnnnnnnnnnnnnnnnnnnnnnnnnnnnnnnnnnnnnnnnnnnnnnnnnnnnnnnnnnnnnnnnnnnnnnnnnnnnnnnnnnnnnnnnnnnnnnnnnnnnnnnnnnnnnnnnnnnnnnnnnnnnnnnnnnnnnnnnnnnnnnnnnnnnnnnnnnnnnnnnnnnnnnnnnnnnnnnnnnnnnnnnnnnnnnnnnnnnnnnnnnnnnnnnnnnnnnnnnnnnnnnnnnnnnnnnnnnnnnnnnnnnnnnnnnnnnnnnnnnnnnnnnnnnnnnnnnnnnnnnnnnnnnnnnnnnnnnnnnnnnnnnnnnnnnnnnnnnnnnnnnnnnnnnnnnnnnnnnnnnnnnnnnnnnnnnnnnnnnnnnnnnnnnnnnnnnnnnnnnnnnnnnnnnnnnnnnnnnnnnnnnnnnnnnnnnnnnnnnnnnnnnnnnnnnnnnnnnnnnnnnnnnnnnnnnnnnnnnnnnnnnnnnnnnnnnnnnnnnnnnnnnnnnnnnnnnnnnnnnnnnnnnnnnnnnnnnnnnnnnnnnnnnnnnnnnnnnnnnnnnnnnnnnnnnnnnnnnnnnnnnnnnnnnnnnnnnnnnnnnnnnnnnnnnnnnnnnnnnnnnnnnnnnnnnnnnnnnnnnnnnnnnnnnnnnnnnnnnnnnnnnnnnnnnnnnnnnnnnnnnnnnnnnnnnnnnnnnnnnnnnnnnnnnnnnnnnnnnnnnnnnnnnnnnnnnnnnnnnnnnnnnnnnnnnnnnnnnnnnnnnnnnnnnnnnnnnnnnnnnnnnnnnnnnnnnnnnnnnnnnnnnnnnnnnnnnnnnnnnnnnnnnnnnnnnnnnnnnnnnnnnnnnnnnnnnnnnnnnnnnnnnnnnnnnnnnnnnnnnnnnnnnnnnnnnnnnnnnnnnnnnnnnnnnnnnnnnnnnnnnnnnnnnnnnnnnnnnnnnnnnnnnnnnnnnnnnnnnnnnnnnnnnnnnnnnnnnnnnnnnnnnnnnnnnnnnnnnnnnnnnnnnnnnnnnnnnnnnnnnnnnnnnnnnnnnnnnnnnnnnnnnnnnnnnnnnnnnnnnnnnnnnnnnnnnnnnnnnnnnnnnnnnnnnnnnnnnnnnnnnnnnnnnnnnnnnnnnnnnnnnnnnnnnnnnnnnnnnnnnnnnnnnnnnnnnnnnnnnnnnnnnnnnnnnnnnnnnnnnnnnnnnnnnnnnnnnnnnnnnnnnnnnnnnnnnnnnnnnnnnnnnnnnnnnnnnnnnnnnnnnnnnnnnnnnnnnnnnnnnnnnnnnnnnnnnnnnnnnnnnnnnnnnnnnnnnnnnnnnnnnnnnnnnnnnnnnnnnnnnnnnnnnnnnnnnnnnnnnnnnnnnnnnnnnnnnnnnnnnnnnnnnnnnnnnnnnnnnnnnnnnnnnnnnnnnnnnnnnnnnnnnnnnnnnnnnnnnnnnnnnnnnnnnnnnnnnnnnnnnnnnnnnnnnnnnnnnnnnnnnnnnnnnnnnnnnnnnnnnnnnnnnnnnnnnnnnnnnnnnnnnnnnnnnnnnnnnnnnnnnnnnnnnnnnnnnnnnnnnnnnnnnnnnnnnnnnnnnnnnnnnnnnnnnnnnnnnnnnnnnnnnnnnnnnnnnnnnnnnnnnnnnnnnnnnnnnnnnnnnnnnnnnnnnnnnnnnnnnnnnnnnnnnnnnnnnnnnnnnnnnnnnnnnnnnnnnnnnnnnnnnnnnnnnnnnnnnnnnnnnnnnnnnnnnnnnnnnnnnnnnnnnnnnnnnnnnnnnnnnnnnnnnnnnnnnnnnnnnnnnnnnnnnnnnnnnnnnnnnnnnnnnnnnnnnnnnnnnnnnnnnnnnnnnnnnnnnnnnnnnnnnnnnnnnnnnnnnnnnnnnnnnnnnnnnnnnnnnnnnnnnnnnnnnnnnnnnnnnnnnnnnnnnnnnnnnnnnnnnnnnnnnnnnnnnnnnnnnnnnnnnnnnnnnnnnnnnnnnnnnnnnnnnnnnnnnnnnnnnnnnnnnnnnnnnnnnnnnnnnnnnnnnnnnnnnnnnnnnnnnnnnnnnnnnnnnnnnnnnnnnnnnnnnnnnnnnnnnnnnnnnnnnnnnnnnnnnnnnnnnnnnnnnnnnnnnnnnnnnnnnnnnnnnnnnnnnnnnnnnnnnnnnnnnnnnnnnnnnnnnnnnnnnnnnnnnnnnnnnnnnnnnnnnnnnnnnnnnnnnnnnnnnnnnnnnnnnnnnnnnnnnnnnnnnnnnnnnnnnnnnnnnnnnnnnnnnnnnnnnnnnnnnnnnnnnnnnnnnnnnnnnnnnnnnnnnnnnnnnnnnnnnnnnnnnnnnnnnnnnnnnnnnnnnnnnnnnnnnnnnnnnnnnnnnnnnnnnnnnnnnnnnnnnnnnnnnnnnnnnnnnnnnnnnnnnnnnnnnnnnnnnnnnnnnnnnnnnnnnnnnnnnnnnnnnnnnnnnnnnnnnnnnnnnnnnnnnnnnnnnnnnnnnnnnnnnnnnnnnnnnnnnnnnnnnnnnnnnnnnnnnnnnnnnnnnnnnnnnnnnnnnnnnnnnnnnnnnnnnnnnnnnnnnnnnnnnnnnnnnnnnnnnnnnnnnnnnnnnnnnnnnnnnnnnnnnnnnnnnnnnnnnnnnnnnnnnnnnnnnnnnnnnnnnnnnnnnnnnnnnnnnnnnnnnnnnnnnnnnnnnnnnnnnnnnnnnnnnnnnnnnnnnnnnnnnnnnnnnnnnnnnnnnnnnnnnnnnnnnnnnnnnnnnnnnnnnnnnnnnnnnnnnnnnnnnnnnnnnnnnnnnnnnnnnnnnnnnnnnnnnnnnnnnnnnnnnnnnnnnnnnnnnnnnnnnnnnnnnnnnnnnnnnnnnnnnnnnnnnnnnnnnnnnnnnnnnnnnnnnnnnnnnnnnnnnnnnnnnnnnnnnnnnnnnnnnnnnnnnnnnnnnnnnnnnnnnnnnnnnnnnnnnnnnnnnnnnnnnnnnnnnnnnnnnnnnnnnnnnnnnnnnnnnnnnnnnnnnnnnnnnnnnnnnnnnnnnnnnnnnnnnnnnnnnnnnnnnnnnnnnnnnnnnnnnnnnnnnnnnnnnnnnnnnnnnnnnnnnnnnnnnnnnnnnnnnnnnnnnnnnnnnnnnnnnnnnnnnnnnnnnnnnnnnnnnnnnnnnnnnnnnnnnnnnnnnnnnnnnnnnnnnnnnnnnnnnnnnnnnnnnnnnnnnnnnnnnnnnnnnnnnnnnnnnnnnnnnnnnnnnnnnnnnnnnnnnnnnnnnnnnnnnnnnnnnnnnnnnnnnnnnnnnnnnnnnnnnnnnnnnnnnnnnnnnnnnnnnnnnnnnnnnnnnnnnnnnnnnnnnnnnnnnnnnnnnnnnnnnnnnnnnnnnnnnnnnnnnnnnnnnnnnnnnnnnnnnnnnnnnnnnnnnnnnnnnnnnnnnnnnnnnnnnnnnnnnnnnnnnnnnnnnnnnnnnnnnnnnnnnnnnnnnnnnnnnnnnnnnnnnnnnnnnnnnnnnnnnnnnnnnnnnnnnnnnnnnnnnnnnnnnnnnnnnnnnnnnnnnnnnnnnnnnnnnnnnnnnnnnnnnnnnnnnnnnnnnnnnnnnnnnnnnnnnnnnnnnnnnnnnnnnnnnnnnnnnnnnnnnnnnnnnnnnnnnnnnnnnnnnnnnnnnnnnnnnnnnnnnnnnnnnnnnnnnnnnnnnnnnnnnnnnnnnnnnnnnnnnnnnnnnnnnnnnnnnnnnnnnnnnnnnnnnnnnnnnnnnnnnnnnnnnnnnnnnnnnnnnnnnnnnnnnnnnnnnnnnnnnnnnnnnnnnnnnnnnnnnnnnnnnnnnnnnnnnnnnnnnnnnnnnnnnnnnnnnnnnnnnnnnnnnnnnnnnnnnnnnnnnnnnnnnnnnnnnnnnnnnnnnnnnnnnnnnnnnnnnnnnnnnnnnnnnnnnnnnnnnnnnnnnnnnnnnnnnnnnnnnnnnnnnnnnnnnnnnnnnnnnnnnnnnnnnnnnnnnnnnnnnnnnnnnnnnnnnnnnnnnnnnnnnnnnnnnnnnnnnnnnnnnnnnnnnnnnnnnnnnnnnnnnnnnnnnnnnnnnnnnnnnnnnnnnnnnnnnnnnnnnnnnnnnnnnnnnnnnnnnnnnnnnnnnnnnnnnnnnnnnnnnnnnnnnnnnnnnnnnnnnnnnnnnnnnnnnnnnnnnnnnnnnnnnnnnnnnnnnnnnnnnnnnnnnnnnnnnnnnnnnnnnnnnnnnnnnnnnnnnnnnnnnnnnnnnnnnnnnnnnnnnnnnnnnnnnnnnnnnnnnnnnnnnnnnnnnnnnnnnnnnnnnnnnnnnnnnnnnnnnnnnnnnnnnnnnnnnnnnnnnnnnnnnnnnnnnnnnnnnnnnnnnnnnnnnnnnnnnnnnnnnnnnnnnnnnnnnnnnnnnnnnnnnnnnnnnnnnnnnnnnnnnnnnnnnnnnnnnnnnnnnnnnnnnnnnnnnnnnnnnnnnnnnnnnnnnnnnnnnnnnnnnnnnnnnnnnnnnnnnnnnnnnnnnnnnnnnnnnnnnnnnnnnnnnnnnnnnnnnnnnnnnnnnnnnnnnnnnnnnnnnnnnnnnnnnnnnnnnnnnnnnnnnnnnnnnnnnnnnnnnnnnnnnnnnnnnnnnnnnnnnnnnnnnnnnnnnnnnnnnnnnnnnnnnnnnnnnnnnnnnnnnnnnnnnnnnnnnnnnnnnnnnnnnnnnnnnnnnnnnnnnnnnnnnnnnnnnnnnnnnnnnnnnnnnnnnnnnnnnnnnnnnnnnnnnnnnnnnnnnnnnnnnnnnnnnnnnnnnnnnnnnnnnnnnnnnnnnnnnnnnnnnnnnnnnnnnnnnnnnnnnnnnnnnnnnnnnnnnnnnnnnnnnnnnnnnnnnnnnnnnnnnnnnnnnnnnnnnnnnnnnnnnnnnnnnnnnnnnnnnnnnnnnnnnnnnnnnnnnnnnnnnnnnnnnnnnnnnnnnnnnnnnnnnnnnnnnnnnnnnnnnnnnnnnnnnnnnnnnnnnnnnnnnnnnnnnnnnnnnnnnnnnnnnnnnnnnnnnnnnnnnnnnnnnnnnnnnnnnnnnnnnnnnnnnnnnnnnnnnnnnnnnnnnnnnnnnnnnnnnnnnnnnnnnnnnnnnnnnnnnnnnnnnnnnnnnnnnnnnnnnnnnnnnnnnnnnnnnnnnnnnnnnnnnnnnnnnnnnnnnnnnnnnnnnnnnnnnnnnnnnnnnnnnnnnnnnnnnnnnnnnnnnnnnnnnnnnnnnnnnnnnnnnnnnnnnnnnnnnnnnnnnnnnnnnnnnnnnnnnnnnnnnnnnnnnnnnnnnnnnnnnnnnnnnnnnnnnnnnnnnnnnnnnnnnnnnnnnnnnnnnnnnnnnnnnnnnnnnnnnnnnnnnnnnnnnnnnnnnnnnnnnnnnnnnnnnnnnnnnnnnnnnnnnnnnnnnnnnnnnnnnnnnnnnnnnnnnnnnnnnnnnnnnnnnnnnnnnnnnnnnnnnnnnnnnnnnnnnnnnnnnnnnnnnnnnnnnnnnnnnnnnnnnnnnnnnnnnnnnnnnnnnnnnnnnnnnnnnnnnnnnnnnnnnnnnnnnnnnnnnnnnnnnnnnnnnnnnnnnnnnnnnnnnnnnnnnnnnnnnnnnnnnnnnnnnnnnnnnnnnnnnnnnnnnnnnnnnnnnnnnnnnnnnnnnnnnnnnnnnnnnnnnnnnnnnnnnnnnnnnnnnnnnnnnnnnnnnnnnnnnnnnnnnnnnnnnnnnnnnnnnnnnnnnnnnnnnnnnnnnnnnnnnnnnnnnnnnnnnnnnnnnnnnnnnnnnnnnnnnnnnnnnnnnnnnnnnnnnnnnnnnnnnnnnnnnnnnnnnnnnnnnnnnnnnnnnnnnnnnnnnnnnnnnnnnnnnnnnnnnnnnnnnnnnnnnnnnnnnnnnnnnnnnnnnnnnnnnnnnnnnnnnnnnnnnnnnnnnnnnnnnnnnnnnnnnnnnnnnnnnnnnnnnnnnnnnnnnnnnnnnnnnnnnnnnnnnnnnnnnnnnnnnnnnnnnnnnnnnnnnnnnnnnnnnnnnnnnnnnnnnnnnnnnnnnnnnnnnnnnnnnnnnnnnnnnnnnnnnnnnnnnnnnnnnnnnnnnnnnnnnnnnnnnnnnnnnnnnnnnnnnnnnnnnnnnnnnnnnnnnnnnnnnnnnnnnnnnnnnnnnnnnnnnnnnnnnnnnnnnnnnnnnnnnnnnnnnnnnnnnnnnnnnnnnnnnnnnnnnnnnnnnnnnnnnnnnnnnnnnnnnnnnnnnnnnnnnnnnnnnnnnnnnnnnnnnnnnnnnnnnnnnnnnnnnnnnnnnnnnnnnnnnnnnnnnnnnnnnnnnnnnnnnnnnnnnnnnnnnnnnnnnnnnnnnnnnnnnnnnnnnnnnnnnnnnnnnnnnnnnnnnnnnnnnnnnnnnnnnnnnnnnnnnnnnnnnnnnnnnnnnnnnnnnnnnnnnnnnnnnnnnnnnnnnnnnnnnnnnnnnnnnnnnnnnnnnnnnnnnnnnnnnnnnnnnnnnnnnnnnnnnnnnnnnnnnnnnnnnnnnnnnnnnnnnnnnnnnnnnnnnnnnnnnnnnnnnnnnnnnnnnnnnnnnnnnnnnnnnnnnnnnnnnnnnnnnnnnnnnnnnnnnnnnnnnnnnnnnnnnnnnnnnnnnnnnnnnnnnnnnnnnnnnnnnnnnnnnnnnnnnnnnnnnnnnnnnnnnnnnnnnnnnnnnnnnnnnnnnnnnnnnnnnnnnnnnnnnnnnnnnnnnnnnnnnnnnnnnnnnnnnnnnnnnnnnnnnnnnnnnnnnnnnnnnnnnnnnnnnnnnnnnnnnnnnnnnnnnnnnnnnnnnnnnnnnnnnnnnnnnnnnnnnnnnnnnnnnnnnnnnnnnnnnnnnnnnnnnnnnnnnnnnnnnnnnnnnnnnnnnnnnnnnnnnnnnnnnnnnnnnnnnnnnnnnnnnnnnnnnnnnnnnnnnnnnnnnnnnnnnnnnnnnnnnnnnnnnnnnnnnnnnnnnnnnnnnnnnnnnnnnnnnnnnnnnnnnnnnnnnnnnnnnnnnnnnnnnnnnnnnnnnnnnnnnnnnnnnnnnnnnnnnnnnnnnnnnnnnnnnnnnnnnnnnnnnnnnnnnnnnnnnnnnnnnnnnnnnnnnnnnnnnnnnnnnnnnnnnnnnnnnnnnnnnnnnnnnnnnnnnnnnnnnnnnnnnnnnnnnnnnnnnnnnnnnnnnnnnnnnnnnnnnnnnnnnnnnnnnnnnnnnnnnnnnnnnnnnnnnnntccccgccggaagtgcggtcagaggctaatatatcatagctgtatagctaagacaagaaaatttcttaatttttcgattttcttgattttttcacagcttctttttgtcgggatgtatgcgccacagggacgatatattgttggggtgggttctacgacatgaacatctggagccccaagaagcgagacgagaaattgaatcacaggcgcgacaatcccgtcaaacgagtgctggtcaagcacccgggcgactggccgcggtcgcgctgcggcgggaggttctatttctggaatgatggttcgatcttgagcatggacaagaggctatgaaggtgtcgacatgccgaggggcgcatacatcccgacaaaaacccgtcgggacgtatgcgccacccgcgaaatcgatcgcaagattccctccgaatcggaacgccgcggaggcatcaaagcttctgcgcttagtcaacggcgcgccttgcagcctgtgaagtgtgggctaagcggacgcgataaccgttgtcgtggtcttcgggccttgcctttgccgcgtcccgggtgtataccttcgccatgattgtcctgtggtagctacgcagcggacggtccggtccccccggggcgcgacgggcctgccacccgcctcttgcccaggcaaggaggaagccgtggagtacaacctgctcgaagaaaagtggattcccgttctgtggaaagatgggcacagcggtcgcgtgggcattagtgaggcccttaggcaagcaggccggattcgccaaatcgcggccagcaacccaatggaccgcctggccatcctgcgtttcctgcttgcgttgctctattggtgcaaagggaatcccccggacgacaagaactcgatttcttcgtttccctctgattggttcaagaaactcgatgacaacaaagactgtttcaaccttcagggcgatgggaagcggttttaccaacgcaagcctaaccgacttgagaagaagctgtccgtcaactatctgatgcaagaagtgccgaccggcacaaacttctggcacttccggcatgggacagatttcagaaacggcttatgtccggcatgctgcgcaatgggcttgttgcgccttccgctctttgctacgtcggccgggcgcggcaagcccccgggcgtcaatcaaaaaccgccgatctacatcgtgccgatgggcgactgcctttccgaaaccctgcgcctctcatggcggaagacgtcggagatgaacctgggcacgcccacatgggaaaatccggacataagcctccctcaacacggcaatgttccattattgataggattaacgtgggtaccgcggcgcgtctggttagacactccggagacaccagagtccaactgcatcgcctgcgggcgcagggaggctctgatacgtcaatgtgtctttgcgggtattgggagcacaaagacaggcgaaggcagtctggcacgaatctggaacgacccgcacaccatcagcgaaggcgacgagattgtgaagcctttcagcgcgcttggcccggccgacgctgcggctgggaagtggacgaaggtcgtggcgggaatcctgtgcggggaaaagccgaaggggaacagtaagttgtgggtcgtcagctttgcgacagtgcagaacgacaaatacctggaagcagccgagcgggagattcaattcttggccgcgctcgacgacgtgaaggttcaggcgagtttgcaagaaatccaggcgtggcagaaggaaggctggaagctcgttggcagagccaaaccgcgagagacttcacgaaacagaggacaccttgaaattctctccgcagtcgccgctgttcgtccccaagccgaggcaacggtttccggaaaaatcgacgagatgatcgcagaaggcggtaaggcatgggaagaggcggcccaggaatatcgtccgttgatggccgccgtcgccaaatcgctttccccgggctacacaaccgcttccctccggaggcgacaagaaattgccgctgtaaagccggacatgcggccaaagagaaacaacaaagacgaagggggggacaagtgactccaacggagcagtacgtcgaagttctgactcgactgaaacccggtgagctcgggctcttgcgcaaccatgccgggcaagggctcgacgaatcggtagagggctttgaccttttcgcaggcctttggtggccgctgcgggcgcaaacccaacgggcgcctcgccgtgaggtggcctggcttgtcgccaaactctacgccctccggcccctcgagcattcaccccgcgagaccctcgctcgccagctcgggcgatcccggccgggcgagaaaacagcgcggcagcgtttcgagcaacgcttcgacaggatgctcacgctgccgcttgctgaaatcgaacccgccctacagtgggcaatcgacctcatagcttccaagcacctcgaactcgactgggtgcggctgacgaacgatctttccatctgggaacgcgaatccacccggctcaaatgggccgaggaatttttgaactgtccaagaggaggagagtcatgttgatccagattcacgccattcagaatcacagcccggccaacctgaaccgggatgacctgggcgcgcccaagacttgcttttttggcggagtcttgcgctcccgtatttccagccagtgccttaagcgcagcatccgcatgagtgaggagttcagacaattgctgggcggagttcgcacccgccagttggcgaaagagattgcggaaaaggtgacgggcaaagacgtcaggaagcgagcggagaacattctcaaagcctgcgggctggagcctaagaaagcaaaaaaacaggaaggagaagacgaacaggaaagtgctgagaggagcaagatgctggtttacaccacccaagaggcgattacacgcatggccgaactcctccagcagggcgacggaaaaacggacgaggccttggcagcggagttcggcaagctcatcagtgaatccgtcgccgtgccggacatggcgctgagcggcaggatgcttgaaacgggagtcctcaaagacacgacggttgaggcatcgcttcaagtcgcccatgccatttccacccatgaggcccggcccgaggtggactactatgtcgccgccgatgatgtccccggcgaggacgcgggcgcaggttacgtggatgaagccatgttcggttcggcatgtttctacaagtatttctccattcattgggaaacgctggtcaaaaacctgaagcccttcgggacgaatcacgaaaaactggcggcccataccgtcggcgccttcattcgcgccgcggccttggccaaccccacgggaaaacaaaatagttttgccgcgcacaaccctcctgacgggatgttggtggaagtcagaaacactcccatcagctacgccaacgccttcgccaaaccggcggctcctcagggcgaacgggacatcatctcgcagagcgtggcgcagcttgcccattatgtgaacgacatagatacgggatacggcaagccgacgaagcggttctggttctctccaaatctccgctatccgttgacggctaccaccacggagagcgaagacggaaaacagaaacagcgtgaggtcccgcttgccgacaaagatgttaagtctcttgacgaactgatagcggctgtactcaaggaaatcggttacgactggcaggaggccaagaaagtggtcctgaatccggaggtgccccatgagcgcaaagacgctgctacttcggcttgaaggtcctcttcaggcatggggcgatcagcaatccaagttcgtcattcggcgcacggccgaggcgccgaccaagtccggcgtcatcgggatgctttgcgcggcattgggcgtttcccggccagaggcccgcgaaggctggcttccaaggctggcccggctgcgcatgggcgtacgcgtcgatgcgccaggggtccgctggtgggattatcacacggtgggtgcggggatgccgatgcgtaccgccgaggggggaaccaagtccggagccatgctcacccgccgcgaatacctttgcgacgcctcgtttctcgtcgctcttcagggcgaaccggacctcattgaggaactggaggcggcaatcaaagcgcccaagtggacactctacctcggcagaaagtgctgccccccttgccgccctctgctggagcatccgggaggtgaattccccgacttgctttctgccctcgaatcggtcccctggcgtcggcggctgaaggacgatccccagccgcgacccgtcgattgcctgcttgattgggaacccaccaacgagcagcccgaggcgcccgatgatgcgctcgtctggtacgacgtgccgttgacattcgagccgccgtcgcaccaaccccgattcgtcatccgcaggcagttgcgcgtcggagcggacggcgacgtaacacttgcggtgcagccaccgcagagcgacacgccaccgcctccgcgcccaagagcggattacacgaacacagagtacaaaaaccgacgcaaggagcggctcgacgacgactatcacttgtgcgttttttgcaagtctcccgccagcaccgtgcagcacatcacgtaccgccgcgcgggcggcggcgaactccgggacgatttgcgctccctctgccgcctctgccacgacgccgtgaccatgatcgagtacgggctcggaatgggcttggaccgcatcaaccccgaagagccccgttggcgcgacaagatcatcgagaagcgggaagagattatcaggttccgctctctggagactcgccgcagacgccttgccgctgaggaggtggaatagccatgtacctctcctgcctcttgattgacgtcggcaccaaccccgaccgccccaggcccgggcggctctggctgcgaaacctccatcacgtccaccagcgcctttgcatggcgtttccatccaaagaccgaatatcccacgatccccacttcctcaagcctttcaaacccgcggactttgccaacaaccaggtccatgtaagacgtgacggcgactccggctttctcttccgcatcgacccgcaaccgggcgggcgggtcgtgatcctcgtccagtctaactctgccgtaaagcctgactggggctacgccttccacaacgcccgttttcttctgaatcctctagccgctccccctcaggtgcaggaattcgacccccgctttgagaagggtcagcggcttcgcttccgtatccgcgccaatctgagtaagaagataaaaaccagcacagagggcgttgatcttacgaggacgcgagaggggacagataagcggggccgcccgaaggcccaaggcaaacgcgtggcgctgacctgggacaaggaccagaaccgcgacgatgtgatacgaaaatggttcgccggcaagggcggccaaggtggattccaagtggaaactttccgggtcttgcagatcgggtggggcgcaggagaccgatccgacccgaggccgacgggcggccgcatgaaatttcgctcggcgttattggaggggacgcttacggttgaggacgcggacagcttcagagaaaccatcgtgggcggcgttgggcacggcaaagccttcggcttcggcctgctttccgtggcgccgctctcgctgtagcggcggtctccgaccgccggtacgtcgatcggagatcgacgctacaatcccttgtcgatcggggatccgtgcaacatttcttgagcggagatcgagccaatatgaaattcaaaccccgcttgcggcgactggactggctctatacgggcagcccaatctactatctcacgctgtgtacgcaggaccgcaaacgctcgttggcaaatcctgcgattcaccgggaattcacgagattctccgaacgggcgagcgattttcttgtttgggtcgggttcttcatgatcatgcctgatcacatccatcttttcgccggcttttgtcgtgagtccccacctttagggaaatggatcaaggcgctgcgcggggatttatccaaagtcctccgggaagatgagggcgagggcacacattgggagaaagactttttcgatcacgtcctgagatcgcaagaatcctatcgggagaaatatgaatatgtccggcagaatccggtccgggccggtttagtcaagcgcccggaagattggccgtaccagggtgagatccatcgcctggttttgtagcggcggtctccgaccgccgtaacgtcgatcggagatcgactacaaccccggtcgatcggagatcgacgctacaaccgccgtcgatcggagatcgacgctacagcacgggctggaggctctgtgagaattcaagatctccacgttctacccaagttcagtgacgggtggagttatctgtacgtcgagcattgccacgtcgatcaggaagagcgggccattgccgtccacgatcaagccgggaaggtgccggtcccctgtgccaatctggctctcctgatgttgggtccgggcgtctcgattactcacgccgccatctccgtgttggcggaccatgggtgcctggtggcttggtgcggggaggagggagtccgcttctacgccgtgggcatgggcgagacgcgcaacgcggccaacttcctgcatcaggcgaggctgtgggcggaccagggtttccatatgcaggtggtgcgccgcctctatcagttgcgattttcggagaagttcgaccctgccctgaccctccagcaaatccgcggcatggagggcgtgcgggtgcgcgatgcctacgccaaggccgcccaggaagccggcatcacgtggtcgggccgcagctataaacgcgatgagtggagcaaggcggaccctgccaaccgagccttgtccgccgctaactcctgcctatatggaatctgccatgctgccatcgtgtcagcaggtttttcgcccgcactcgggtttatccacaccggcaagatgctgtccttcgtctacgatctcgccgacctgtacaaggctgaaattaccgttccagtggcatttcgcgccgccgccgaggggacgggacagttggaacgccgggtgcgcatcacctgccgcgatcagttcgtatccacgcggcttctggagagaatcatcccggatgtccaaagggcgttgatgctggcaaaagcgacggcctgggacactaccttcgacctggatgccgccgcccccggcttcctctgggacaatctggaaggagaggtcgaaggcggccgcctgctagcccccgaaatcggtgaaacggagcccggcgatggtggtcctgattcttgagcgcgtccccccagggttgcgaggcgagctgactcgctggtttttggaacctcaggcgggagtgttcgtgggacgcgtctccgccatggtccgtgatcggctctgggaaaaagcctgcagccaggccaagggaggcgggtgcttgattatctattcaagcgacaatgaacagggctttcgagtccgaacctggggccaaacagctcgggtcatcgatgacttcgagggcctttttctcgttcgcatgccgcagaatcaataatttagtaagtgttgtccccacgcgcgtgggggtgaaccgccggggctgaaggtttcatgggctggaaagaagttgtccccacgcgcgtgggggtgaaccgatatgctgcatgtgccggggctggcgcttgatgttgtccccacgcgcgtgggggtgaaccggtatcggcgagtggcaaggcgaatccacttaggttgtccccacgcgcgtgggggtgaaccgacctccgagggcgcggggcgcgtgctggcgatgttgtccccacgcgcgtgggggtgaaccggctggggccgacgcgcgcttgtgagactgcgggttgtccccacgcgcgtgggggtgaaccgcgggagaactttgaaggcacggtcctcgatcacgttgtccccacgcgcgtgggggtgaaccggcgcaggttaaggctgaggccaaggccgatgcgttgtccccacgcgcgtgggggtgaaccgtaatggtggcttgcaccttctgctcgaccgatgttgtccccacgcgcgtgggggtgaaccgcagcgggccgtgttggaggagaaggtcgcggagttgtccccacgcgcgtgggggtgaaccgttcccagccgcaggcaggatcaccgtaccccagttgtccccacgcgcgtgggggtgaaccgcaaaacaatatcaagaccaagcacttggatgtgttgtccccacgcgcgtgggggtgaaccgcatcgggcagcacagcggccttataccccaaagttgtccccacgcgcgtgggggtgaaccggcagctcgcggcgattcgcattgccgctgaaagttgtccccacgcgcgtgggggtgaaccggggagtcgtgagtgtagttacaggcagggttcgttgtccccacgcgcgtgggggtgaaccgcttctgcatcttataaagaacgccagtttgaagttgtccccacgcgcgtgggggtgaaccggtacggttcccaggggaattatttcttggggtgttgtccccacgcgcgtgggggtgaaccgatgtagcttgatatgggtgtggtgtcgcagaagttgtccccacgcgcgtgggggtgaaccggcggcgcgcacattccaacctcgtccgtatccgttgtccccacgcgcgtgggggtgaaccggcggacacggcggatgtgacgaatatggagtcgttgtccccacgcgcgtgggggtgaaccggtctctcgaaaaggaaagccaactttcagcttgttgtccccacgcgcgtgggggtgaaccgctcttggcatagagcttagtgagtttgatgaagttgtccccacgcgcgtgggggtgaaccgcctttgccctccgagacgcaacagctccattcgttgtccccacgcgcgtgggggtgaaccggcgagcgcaggtctaagcgaccgcgacaaagagttgtccccacgcgcgtgggggtgaaccggtgatggacacttcctaaaatggcattaagtcgttgtccccacgcgcgtgggggtgaaccgcagcgggtagcgcagacttcgtgcatatcgaagtctgcggcttttgccgccgtgaatcttgaaaagccgcagacctgcaaaaagcgcaggtctgcgctacccactgcctggccatcctggagaattgaaagtccctccagtaaagcggcgaagcgcaggatttccggctgcttcaatcgcttgcgacgctcaccggtcagtagcgcgttggtaatttcgagcccccatacggctggaacaacgagcgtctgcccttcagtgccaccaggaccccgtccgcgtattcgctcgcttcatccggggagcaccaggcaagcgccaccgacgcatgcaccacaacgccgctcaaaatcgccgtccctcaattatcatttcgcggacgctcatggtgtggggctttacgcgcttgcgcaacgcgcgcatgccctcgacaatctcctcgtgcgtcagctttcgatccgagtctcgaaccggcaccagcattgccgccggaacgccgtgtcttgtaatcgtgatcctttcgcaacccatcttgtccagctaaagctccgcatcagctatagtctccctctggccgtgcggcccgccccttgcggcgcaaccaaaccgaagctcaaaacgcgacatcgtcctcgtagcgcgaccggacactgaaggtaaaggttcgccacccgtctcccctgcaaaaccgggtcgcggagtactattgctttgcacagcgggggacgaccgaggcgctacggaagaggttggttcgcgaaactgagcaagagacccctcacccgtcccgctccggctggtggaagcgccggagcgggacacgctcagccccaagggagagggctatggattcagttctacgcgcggtgtccagtcaaagatgtgggacacgctcagccccaagggagagggctatggattcagttctacgcgcggtg

SEQ ID NO: 1047 - DNA, 106286 bp, Artificial Sequence; identical to SEQ ID NO: 1038
  Synthetic Oligonucleotide
  misc_feature (1)..(96242): n is a, c, g, or t

SEQ ID NO: 1048 - DNA, 106286 bp, Artificial Sequence; identical to SEQ ID NO: 1038
  Synthetic Oligonucleotide
  misc_feature (1)..(96242): n is a, c, g, or t

SEQ ID NO: 1049 - DNA, 106286 bp, Artificial Sequence; identical to SEQ ID NO: 1038
  Synthetic Oligonucleotide
  misc_feature (1)..(96242): n is a, c, g, or t

SEQ ID NO: 1050 - DNA, 106286 bp, Artificial Sequence; identical to SEQ ID NO: 1038
  Synthetic Oligonucleotide
  misc_feature (1)..(96242): n is a, c, g, or t

SEQ ID NO: 1051 - DNA, 106286 bp, Artificial Sequence; identical to SEQ ID NO: 1038
  Synthetic Oligonucleotide
  misc_feature (1)..(96242): n is a, c, g, or t

SEQ ID NO: 1052 - DNA, 106286 bp, Artificial Sequence; identical to SEQ ID NO: 1038
  Synthetic Oligonucleotide
  misc_feature (1)..(96242): n is a, c, g, or t

SEQ ID NO: 1053 - DNA, 106286 bp, Artificial Sequence; identical to SEQ ID NO: 1038
  Synthetic Oligonucleotide
  misc_feature (1)..(96242): n is a, c, g, or t

SEQ ID NO: 1054 - DNA, 106286 bp, Artificial Sequence
  Synthetic Oligonucleotide
  misc_feature (1)..(96242): n is a, c, g, or t
nnnnnnnnnnnnnnnnnnnnnnnnnnnnnnnnnnnnnnnnnnnnnnnnnnnnnnnnnnnnnnnnnnnnnnnnnnnnnnnnnnnnnnnnnnnnnnnnnnnnnnnnnnnnnnnnnnnnnnnnnnnnnnnnnnnnnnnnnnnnnnnnnnnnnnnnnnnnnnnnnnnnnnnnnnnnnnnnnnnnnnnnnnnnnnnnnnnnnnnnnnnnnnnnnnnnnnnnnnnnnnnnnnnnnnnnnnnnnnnnnnnnnnnnnnnnnnnnnnnnnnnnnnnnnnnnnnnnnnnnnnnnnnnnnnnnnnnnnnnnnnnnnnnnnnnnnnnnnnnnnnnnnnnnnnnnnnnnnnnnnnnnnnnnnnnnnnnnnnnnnnnnnnnnnnnnnnnnnnnnnnnnnnnnnnnnnnnnnnnnnnnnnnnnnnnnnnnnnnnnnnnnnnnnnnnnnnnnnnnnnnnnnnnnnnnnnnnnnnnnnnnnnnnnnnnnnnnnnnnnnnnnnnnnnnnnnnnnnnnnnnnnnnnnnnnnnnnnnnnnnnnnnnnnnnnnnnnnnnnnnnnnnnnnnnnnnnnnnnnnnnnnnnnnnnnnnnnnnnnnnnnnnnnnnnnnnnnnnnnnnnnnnnnnnnnnnnnnnnnnnnnnnnnnnnnnnnnnnnnnnnnnnnnnnnnnnnnnnnnnnnnnnnnnnnnnnnnnnnnnnnnnnnnnnnnnnnnnnnnnnnnnnnnnnnnnnnnnnnnnnnnnnnnnnnnnnnnnnnnnnnnnnnnnnnnnnnnnnnnnnnnnnnnnnnnnnnnnnnnnnnnnnnnnnnnnnnnnnnnnnnnnnnnnnnnnnnnnnnnnnnnnnnnnnnnnnnnnnnnnnnnnnnnnnnnnnnnnnnnnnnnnnnnnnnnnnnnnnnnnnnnnnnnnnnnnnnnnnnnnnnnnnnnnnnnnnnnnnnnnnnnnnnnnnnnnnnnnnnnnnnnnnnnnnnnnnnnnnnnnnnnnnnnnnnnnnnnnnnnnnnnnnnnnnnnnnnnnnnnnnnnnnnnnnnnnnnnnnnnnnnnnnnnnnnnnnnnnnnnnnnnnnnnnnnnnnnnnnnnnnnnnnnnnnnnnnnnnnnnnnnnnnnnnnnnnnnnnnnnnnnnnnnnnnnnnnnnnnnnnnnnnnnnnnnnnnnnnnnnnnnnnnnnnnnnnnnnnnnnnnnnnnnnnnnnnnnnnnnnnnnnnnnnnnnnnnnnnnnnnnnnnnnnnnnnnnnnnnnnnnnnnnnnnnnnnnnnnnnnnnnnnnnnnnnnnnnnnnnnnnnnnnnnnnnnnnnnnnnnnnnnnnnnnnnnnnnnnnnnnnnnnnnnnnnnnnnnnnnnnnnnnnnnnnnnnnnnnnnnnnnnnnnnnnnnnnnnnnnnnnnnnnnnnnnnnnnnnnnnnnnnnnnnnnnnnnnnnnnnnnnnnnnnnnnnnnnnnnnnnnnnnnnnnnnnnnnnnnnnnnnnnnnnnnnnnnnnnnnnnnnnnnnnnnnnnnnnnnnnnnnnnnnnnnnnnnnnnnnnnnnnnnnnnnnnnnnnnnnnnnnnnnnnnnnnnnnnnnnnnnnnnnnnnnnnnnnnnnnnnnnnnnnnnnnnnnnnnnnnnnnnnnnnnnnnnnnnnnnnnnnnnnnnnnnnnnnnnnnnnnnnnnnnnnnnnnnnnnnnnnnnnnnnnnnnnnnnnnnnnnnnnnnnnnnnnnnnnnnnnnnnnnnnnnnnnnnnnnnnnnnnnnnnnnnnnnnnnnnnnnnnnnnnnnnnnnnnnnnnnnnnnnnnnnnnnnnnnnnnnnnnnnnnnnnnnnnnnnnnnnnnnnnnnnnnnnnnnnnnnnnnnnnnnnnnnnnnnnnnnnnnnnnnnnnnnnnnnnnnnnnnnnnnnnnnnnnnnnnnnnnnnnnnnnnnnnnnnnnnnnnnnnnnnnnnnnnnnnnnnnnnnnnnnnnnnnnnnnnnnnnnnnnnnnnnnnnnnnnnnnnnnnnnnnnnnnnnnnnnnnnnnnnnnnnnnnnnnnnnnnnnnnnnnnnnnnnnnnnnnnnnnnnnnnnnnnnnnnnnnnnnnnnnnnnnnnnnnnnnnnnnnnnnnnnnnnnnnnnnnnnnnnnnnnnnnnnnnnnnnnnnnnnnnnnnnnnnnnnnnnnnnnnnnnnnnnnnnnnnnnnnnnnnnnnnnnnnnnnnnnnnnnnnnnnnnnnnnnnnnnnnnnnnnnnnnnnnnnnnnnnnnnnnnnnnnnnnnnnnnnnnnnnnnnnnnnnnnnnnnnnnnnnnnnnnnnnnnnnnnnnnnnnnnnnnnnnnnnnnnnnnnnnnnnnnnnnnnnnnnnnnnnnnnnnnnnnnnnnnnnnnnnnnnnnnnnnnnnnnnnnnnnnnnnnnnnnnnnnnnnnnnnnnnnnnnnnnnnnnnnnnnnnnnnnnnnnnnnnnnnnnnnnnnnnnnnnnnnnnnnnnnnnnnnnnnnnnnnnnnnnnnnnnnnnnnnnnnnnnnnnnnnnnnnnnnnnnnnnnnnnnnnnnnnnnnnnnnnnnnnnnnnnnnnnnnnnnnnnnnnnnnnnnnnnnnnnnnnnnnnnnnnnnnnnnnnnnnnnnnnnnnnnnnnnnnnnnnnnnnnnnnnnnnnnnnnnnnnnnnnnnnnnnnnnnnnnnnnnnnnnnnnnnnnnnnnnnnnnnnnnnnnnnnnnnnnnnnnnnnnnnnnnnnnnnnnnnnnnnnnnnnnnnnnnnnnnnnnnnnnnnnnnnnnnnnnnnnnnnnnnnnnnnnnnnnnnnnnnnnnnnnnnnnnnnnnnnnnnnnnnnnnnnnnnnnnnnnnnnnnnnnnnnnnnnnnnnnnnnnnnnnnnnnnnnnnnnnnnnnnnnnnnnnnnnnnnnnnnnnnnnnnnnnnnnnnnnnnnnnnnnnnnnnnnnnnnnnnnnnnnnnnnnnnnnnnnnnnnnnnnnnnnnnnnnnnnnnnnnnnnnnnnnnnnnnnnnnnnnnnnnnnnnnnnnnnnnnnnnnnnnnnnnnnnnnnnnnnnnnnnnnnnnnnnnnnnnnnnnnnnnnnnnnnnnnnnnnnnnnnnnnnnnnnnnnnnnnnnnnnnnnnnnnnnnnnnnnnnnnnnnnnnnnnnnnnnnnnnnnnnnnnnnnnnnnnnnnnnnnnnnnnnnnnnnnnnnnnnnnnnnnnnnnnnnnnnnnnnnnnnnnnnnnnnnnnnnnnnnnnnnnnnnnnnnnnnnnnnnnnnnnnnnnnnnnnnnnnnnnnnnnnnnnnnnnnnnnnnnnnnnnnnnnnnnnnnnnnnnnnnnnnnnnnnnnnnnnnnnnnnnnnnnnnnnnnnnnnnnnnnnnnnnnnnnnnnnnnnnnnnnnnnnnnnnnnnnnnnnnnnnnnnnnnnnnnnnnnnnnnnnnnnnnnnnnnnnnnnnnnnnnnnnnnnnnnnnnnnnnnnnnnnnnnnnnnnnnnnnnnnnnnnnnnnnnnnnnnnnnnnnnnnnnnnnnnnnnnnnnnnnnnnnnnnnnnnnnnnnnnnnnnnnnnnnnnnnnnnnnnnnnnnnnnnnnnnnnnnnnnnnnnnnnnnnnnnnnnnnnnnnnnnnnnnnnnnnnnnnnnnnnnnnnnnnnnnnnnnnnnnnnnnnnnnnnnnnnnnnnnnnnnnnnnnnnnnnnnnnnnnnnnnnnnnnnnnnnnnnnnnnnnnnnnnnnnnnnnnnnnnnnnnnnnnnnnnnnnnnnnnnnnnnnnnnnnnnnnnnnnnnnnnnnnnnnnnnnnnnnnnnnnnnnnnnnnnnnnnnnnnnnnnnnnnnnnnnnnnnnnnnnnnnnnnnnnnnnnnnnnnnnnnnnnnnnnnnnnnnnnnnnnnnnnnnnnnnnnnnnnnnnnnnnnnnnnnnnnnnnnnnnnnnnnnnnnnnnnnnnnnnnnnnnnnnnnnnnnnnnnnnnnnnnnnnnnnnnnnnnnnnnnnnnnnnnnnnnnnnnnnnnnnnnnnnnnnnnnnnnnnnnnnnnnnnnnnnnnnnnnnnnnnnnnnnnnnnnnnnnnnnnnnnnnnnnnnnnnnnnnnnnnnnnnnnnnnnnnnnnnnnnnnnnnnnnnnnnnnnnnnnnnnnnnnnnnnnnnnnnnnnnnnnnnnnnnnnnnnnnnnnnnnnnnnnnnnnnnnnnnnnnnnnnnnnnnnnnnnnnnnnnnnnnnnnnnnnnnnnnnnnnnnnnnnnnnnnnnnnnnnnnnnnnnnnnnnnnnnnnnnnnnnnnnnnnnnnnnnnnnnnnnnnnnnnnnnnnnnnnnnnnnnnnnnnnnnnnnnnnnnnnnnnnnnnnnnnnnnnnnnnnnnnnnnnnnnnnnnnnnnnnnnnnnnnnnnnnnnnnnnnnnnnnnnnnnnnnnnnnnnnnnnnnnnnnnnnnnnnnnnnnnnnnnnnnnnnnnnnnnnnnnnnnnnnnnnnnnnnnnnnnnnnnnnnnnnnnnnnnnnnnnnnnnnnnnnnnnnnnnnnnnnnnnnnnnnnnnnnnnnnnnnnnnnnnnnnnnnnnnnnnnnnnnnnnnnnnnnnnnnnnnnnnnnnnnnnnnnnnnnnnnnnnnnnnnnnnnnnnnnnnnnnnnnnnnnnnnnnnnnnnnnnnnnnnnnnnnnnnnnnnnnnnnnnnnnnnnnnnnnnnnnnnnnnnnnnnnnnnnnnnnnnnnnnnnnnnnnnnnnnnnnnnnnnnnnnnnnnnnnnnnnnnnnnnnnnnnnnnnnnnnnnnnnnnnnnnnnnnnnnnnnnnnnnnnnnnnnnnnnnnnnnnnnnnnnnnnnnnnnnnnnnnnnnnnnnnnnnnnnnnnnnnnnnnnnnnnnnnnnnnnnnnnnnnnnnnnnnnnnnnnnnnnnnnnnnnnnnnnnnnnnnnnnnnnnnnnnnnnnnnnnnnnnnnnnnnnnnnnnnnnnnnnnnnnnnnnnnnnnnnnnnnnnnnnnnnnnnnnnnnnnnnnnnnnnnnnnnnnnnnnnnnnnnnnnnnnnnnnnnnnnnnnnnnnnnnnnnnnnnnnnnnnnnnnnnnnnnnnnnnnnnnnnnnnnnnnnnnnnnnnnnnnnnnnnnnnnnnnnnnnnnnnnnnnnnnnnnnnnnnnnnnnnnnnnnnnnnnnnnnnnnnnnnnnnnnnnnnnnnnnnnnnnnnnnnnnnnnnnnnnnnnnnnnnnnnnnnnnnnnnnnnnnnnnnnnnnnnnnnnnnnnnnnnnnnnnnnnnnnnnnnnnnnnnnnnnnnnnnnnnnnnnnnnnnnnnnnnnnnnnnnnnnnnnnnnnnnnnnnnnnnnnnnnnnnnnnnnnnnnnnnnnnnnnnnnnnnnnnnnnnnnnnnnnnnnnnnnnnnnnnnnnnnnnnnnnnnnnnnnnnnnnnnnnnnnnnnnnnnnnnnnnnnnnnnnnnnnnnnnnnnnnnnnnnnnnnnnnnnnnnnnnnnnnnnnnnnnnnnnnnnnnnnnnnnnnnnnnnnnnnnnnnnnnnnnnnnnnnnnnnnnnnnnnnnnnnnnnnnnnnnnnnnnnnnnnnnnnnnnnnnnnnnnnnnnnnnnnnnnnnnnnnnnnnnnnnnnnnnnnnnnnnnnnnnnnnnnnnnnnnnnnnnnnnnnnnnnnnnnnnnnnnnnnnnnnnnnnnnnnnnnnnnnnnnnnnnnnnnnnnnnnnnnnnnnnnnnnnnnnnnnnnnnnnnnnnnnnnnnnnnnnnnnnnnnnnnnnnnnnnnnnnnnnnnnnnnnnnnnnnnnnnnnnnnnnnnnnnnnnnnnnnnnnnnnnnnnnnnnnnnnnnnnnnnnnnnnnnnnnnnnnnnnnnnnnnnnnnnnnnnnnnnnnnnnnnnnnnnnnnnnnnnnnnnnnnnnnnnnnnnnnnnnnnnnnnnnnnnnnnnnnnnnnnnnnnnnnnnnnnnnnnnnnnnnnnnnnnnnnnnnnnnnnnnnnnnnnnnnnnnnnnnnnnnnnnnnnnnnnnnnnnnnnnnnnnnnnnnnnnnnnnnnnnnnnnnnnnnnnnnnnnnnnnnnnnnnnnnnnnnnnnnnnnnnnnnnnnnnnnnnnnnnnnnnnnnnnnnnnnnnnnnnnnnnnnnnnnnnnnnnnnnnnnnnnnnnnnnnnnnnnnnnnnnnnnnnnnnnnnnnnnnnnnnnnnnnnnnnnnnnnnnnnnnnnnnnnnnnnnnnnnnnnnnnnnnnnnnnnnnnnnnnnnnnnnnnnnnnnnnnnnnnnnnnnnnnnnnnnnnnnnnnnnnnnnnnnnnnnnnnnnnnnnnnnnnnnnnnnnnnnnnnnnnnnnnnnnnnnnnnnnnnnnnnnnnnnnnnnnnnnnnnnnnnnnnnnnnnnnnnnnnnnnnnnnnnnnnnnnnnnnnnnnnnnnnnnnnnnnnnnnnnnnnnnnnnnnnnnnnnnnnnnnnnnnnnnnnnnnnnnnnnnnnnnnnnnnnnnnnnnnnnnnnnnnnnnnnnnnnnnnnnnnnnnnnnnnnnnnnnnnnnnnnnnnnnnnnnnnnnnnnnnnnnnnnnnnnnnnnnnnnnnnnnnnnnnnnnnnnnnnnnnnnnnnnnnnnnnnnnnnnnnnnnnnnnnnnnnnnnnnnnnnnnnnnnnnnnnnnnnnnnnnnnnnnnnnnnnnnnnnnnnnnnnnnnnnnnnnnnnnnnnnnnnnnnnnnnnnnnnnnnnnnnnnnnnnnnnnnnnnnnnnnnnnnnnnnnnnnnnnnnnnnnnnnnnnnnnnnnnnnnnnnnnnnnnnnnnnnnnnnnnnnnnnnnnnnnnnnnnnnnnnnnnnnnnnnnnnnnnnnnnnnnnnnnnnnnnnnnnnnnnnnnnnnnnnnnnnnnnnnnnnnnnnnnnnnnnnnnnnnnnnnnnnnnnnnnnnnnnnnnnnnnnnnnnnnnnnnnnnnnnnnnnnnnnnnnnnnnnnnnnnnnnnnnnnnnnnnnnnnnnnnnnnnnnnnnnnnnnnnnnnnnnnnnnnnnnnnnnnnnnnnnnnnnnnnnnnnnnnnnnnnnnnnnnnnnnnnnnnnnnnnnnnnnnnnnnnnnnnnnnnnnnnnnnnnnnnnnnnnnnnnnnnnnnnnnnnnnnnnnnnnnnnnnnnnnnnnnnnnnnnnnnnnnnnnnnnnnnnnnnnnnnnnnnnnnnnnnnnnnnnnnnnnnnnnnnnnnnnnnnnnnnnnnnnnnnnnnnnnnnnnnnnnnnnnnnnnnnnnnnnnnnnnnnnnnnnnnnnnnnnnnnnnnnnnnnnnnnnnnnnnnnnnnnnnnnnnnnnnnnnnnnnnnnnnnnnnnnnnnnnnnnnnnnnnnnnnnnnnnnnnnnnnnnnnnnnnnnnnnnnnnnnnnnnnnnnnnnnnnnnnnnnnnnnnnnnnnnnnnnnnnnnnnnnnnnnnnnnnnnnnnnnnnnnnnnnnnnnnnnnnnnnnnnnnnnnnnnnnnnnnnnnnnnnnnnnnnnnnnnnnnnnnnnnnnnnnnnnnnnnnnnnnnnnnnnnnnnnnnnnnnnnnnnnnnnnnnnnnnnnnnnnnnnnnnnnnnnnnnnnnnnnnnnnnnnnnnnnnnnnnnnnnnnnnnnnnnnnnnnnnnnnnnnnnnnnnnnnnnnnnnnnnnnnnnnnnnnnnnnnnnnnnnnnnnnnnnnnnnnnnnnnnnnnnnnnnnnnnnnnnnnnnnnnnnnnnnnnnnnnnnnnnnnnnnnnnnnnnnnnnnnnnnnnnnnnnnnnnnnnnnnnnnnnnnnnnnnnnnnnnnnnnnnnnnnnnnnnnnnnnnnnnnnnnnnnnnnnnnnnnnnnnnnnnnnnnnnnnnnnnnnnnnnnnnnnnnnnnnnnnnnnnnnnnnnnnnnnnnnnnnnnnnnnnnnnnnnnnnnnnnnnnnnnnnnnnnnnnnnnnnnnnnnnnnnnnnnnnnnnnnnnnnnnnnnnnnnnnnnnnnnnnnnnnnnnnnnnnnnnnnnnnnnnnnnnnnnnnnnnnnnnnnnnnnnnnnnnnnnnnnnnnnnnnnnnnnnnnnnnnnnnnnnnnnnnnnnnnnnnnnnnnnnnnnnnnnnnnnnnnnnnnnnnnnnnnnnnnnnnnnnnnnnnnnnnnnnnnnnnnnnnnnnnnnnnnnnnnnnnnnnnnnnnnnnnnnnnnnnnnnnnnnnnnnnnnnnnnnnnnnnnnnnnnnnnnnnnnnnnnnnnnnnnnnnnnnnnnnnnnnnnnnnnnnnnnnnnnnnnnnnnnnnnnnnnnnnnnnnnnnnnnnnnnnnnnnnnnnnnnnnnnnnnnnnnnnnnnnnnnnnnnnnnnnnnnnnnnnnnnnnnnnnnnnnnnnnnnnnnnnnnnnnnnnnnnnnnnnnnnnnnnnnnnnnnnnnnnnnnnnnnnnnnnnnnnnnnnnnnnnnnnnnnnnnnnnnnnnnnnnnnnnnnnnnnnnnnnnnnnnnnnnnnnnnnnnnnnnnnnnnnnnnnnnnnnnnnnnnnnnnnnnnnnnnnnnnnnnnnnnnnnnnnnnnnnnnnnnnnnnnnnnnnnnnnnnnnnnnnnnnnnnnnnnnnnnnnnnnnnnnnnnnnnnnnnnnnnnnnnnnnnnnnnnnnnnnnnnnnnnnnnnnnnnnnnnnnnnnnnnnnnnnnnnnnnnnnnnnnnnnnnnnnnnnnnnnnnnnnnnnnnnnnnnnnnnnnnnnnnnnnnnnnnnnnnnnnnnnnnnnnnnnnnnnnnnnnnnnnnnnnnnnnnnnnnnnnnnnnnnnnnnnnnnnnnnnnnnnnnnnnnnnnnnnnnnnnnnnnnnnnnnnnnnnnnnnnnnnnnnnnnnnnnnnnnnnnnnnnnnnnnnnnnnnnnnnnnnnnnnnnnnnnnnnnnnnnnnnnnnnnnnnnnnnnnnnnnnnnnnnnnnnnnnnnnnnnnnnnnnnnnnnnnnnnnnnnnnnnnnnnnnnnnnnnnnnnnnnnnnnnnnnnnnnnnnnnnnnnnnnnnnnnnnnnnnnnnnnnnnnnnnnnnnnnnnnnnnnnnnnnnnnnnnnnnnnnnnnnnnnnnnnnnnnnnnnnnnnnnnnnnnnnnnnnnnnnnnnnnnnnnnnnnnnnnnnnnnnnnnnnnnnnnnnnnnnnnnnnnnnnnnnnnnnnnnnnnnnnnnnnnnnnnnnnnnnnnnnnnnnnnnnnnnnnnnnnnnnnnnnnnnnnnnnnnnnnnnnnnnnnnnnnnnnnnnnnnnnnnnnnnnnnnnnnnnnnnnnnnnnnnnnnnnnnnnnnnnnnnnnnnnnnnnnnnnnnnnnnnnnnnnnnnnnnnnnnnnnnnnnnnnnnnnnnnnnnnnnnnnnnnnnnnnnnnnnnnnnnnnnnnnnnnnnnnnnnnnnnnnnnnnnnnnnnnnnnnnnnnnnnnnnnnnnnnnnnnnnnnnnnnnnnnnnnnnnnnnnnnnnnnnnnnnnnnnnnnnnnnnnnnnnnnnnnnnnnnnnnnnnnnnnnnnnnnnnnnnnnnnnnnnnnnnnnnnnnnnnnnnnnnnnnnnnnnnnnnnnnnnnnnnnnnnnnnnnnnnnnnnnnnnnnnnnnnnnnnnnnnnnnnnnnnnnnnnnnnnnnnnnnnnnnnnnnnnnnnnnnnnnnnnnnnnnnnnnnnnnnnnnnnnnnnnnnnnnnnnnnnnnnnnnnnnnnnnnnnnnnnnnnnnnnnnnnnnnnnnnnnnnnnnnnnnnnnnnnnnnnnnnnnnnnnnnnnnnnnnnnnnnnnnnnnnnnnnnnnnnnnnnnnnnnnnnnnnnnnnnnnnnnnnnnnnnnnnnnnnnnnnnnnnnnnnnnnnnnnnnnnnnnnnnnnnnnnnnnnnnnnnnnnnnnnnnnnnnnnnnnnnnnnnnnnnnnnnnnnnnnnnnnnnnnnnnnnnnnnnnnnnnnnnnnnnnnnnnnnnnnnnnnnnnnnnnnnnnnnnnnnnnnnnnnnnnnnnnnnnnnnnnnnnnnnnnnnnnnnnnnnnnnnnnnnnnnnnnnnnnnnnnnnnnnnnnnnnnnnnnnnnnnnnnnnnnnnnnnnnnnnnnnnnnnnnnnnnnnnnnnnnnnnnnnnnnnnnnnnnnnnnnnnnnnnnnnnnnnnnnnnnnnnnnnnnnnnnnnnnnnnnnnnnnnnnnnnnnnnnnnnnnnnnnnnnnnnnnnnnnnnnnnnnnnnnnnnnnnnnnnnnnnnnnnnnnnnnnnnnnnnnnnnnnnnnnnnnnnnnnnnnnnnnnnnnnnnnnnnnnnnnnnnnnnnnnnnnnnnnnnnnnnnnnnnnnnnnnnnnnnnnnnnnnnnnnnnnnnnnnnnnnnnnnnnnnnnnnnnnnnnnnnnnnnnnnnnnnnnnnnnnnnnnnnnnnnnnnnnnnnnnnnnnnnnnnnnnnnnnnnnnnnnnnnnnnnnnnnnnnnnnnnnnnnnnnnnnnnnnnnnnnnnnnnnnnnnnnnnnnnnnnnnnnnnnnnnnnnnnnnnnnnnnnnnnnnnnnnnnnnnnnnnnnnnnnnnnnnnnnnnnnnnnnnnnnnnnnnnnnnnnnnnnnnnnnnnnnnnnnnnnnnnnnnnnnnnnnnnnnnnnnnnnnnnnnnnnnnnnnnnnnnnnnnnnnnnnnnnnnnnnnnnnnnnnnnnnnnnnnnnnnnnnnnnnnnnnnnnnnnnnnnnnnnnnnnnnnnnnnnnnnnnnnnnnnnnnnnnnnnnnnnnnnnnnnnnnnnnnnnnnnnnnnnnnnnnnnnnnnnnnnnnnnnnnnnnnnnnnnnnnnnnnnnnnnnnnnnnnnnnnnnnnnnnnnnnnnnnnnnnnnnnnnnnnnnnnnnnnnnnnnnnnnnnnnnnnnnnnnnnnnnnnnnnnnnnnnnnnnnnnnnnnnnnnnnnnnnnnnnnnnnnnnnnnnnnnnnnnnnnnnnnnnnnnnnnnnnnnnnnnnnnnnnnnnnnnnnnnnnnnnnnnnnnnnnnnnnnnnnnnnnnnnnnnnnnnnnnnnnnnnnnnnnnnnnnnnnnnnnnnnnnnnnnnnnnnnnnnnnnnnnnnnnnnnnnnnnnnnnnnnnnnnnnnnnnnnnnnnnnnnnnnnnnnnnnnnnnnnnnnnnnnnnnnnnnnnnnnnnnnnnnnnnnnnnnnnnnnnnnnnnnnnnnnnnnnnnnnnnnnnnnnnnnnnnnnnnnnnnnnnnnnnnnnnnnnnnnnnnnnnnnnnnnnnnnnnnnnnnnnnnnnnnnnnnnnnnnnnnnnnnnnnnnnnnnnnnnnnnnnnnnnnnnnnnnnnnnnnnnnnnnnnnnnnnnnnnnnnnnnnnnnnnnnnnnnnnnnnnnnnnnnnnnnnnnnnnnnnnnnnnnnnnnnnnnnnnnnnnnnnnnnnnnnnnnnnnnnnnnnnnnnnnnnnnnnnnnnnnnnnnnnnnnnnnnnnnnnnnnnnnnnnnnnnnnnnnnnnnnnnnnnnnnnnnnnnnnnnnnnnnnnnnnnnnnnnnnnnnnnnnnnnnnnnnnnnnnnnnnnnnnnnnnnnnnnnnnnnnnnnnnnnnnnnnnnnnnnnnnnnnnnnnnnnnnnnnnnnnnnnnnnnnnnnnnnnnnnnnnnnnnnnnnnnnnnnnnnnnnnnnnnnnnnnnnnnnnnnnnnnnnnnnnnnnnnnnnnnnnnnnnnnnnnnnnnnnnnnnnnnnnnnnnnnnnnnnnnnnnnnnnnnnnnnnnnnnnnnnnnnnnnnnnnnnnnnnnnnnnnnnnnnnnnnnnnnnnnnnnnnnnnnnnnnnnnnnnnnnnnnnnnnnnnnnnnnnnnnnnnnnnnnnnnnnnnnnnnnnnnnnnnnnnnnnnnnnnnnnnnnnnnnnnnnnnnnnnnnnnnnnnnnnnnnnnnnnnnnnnnnnnnnnnnnnnnnnnnnnnnnnnnnnnnnnnnnnnnnnnnnnnnnnnnnnnnnnnnnnnnnnnnnnnnnnnnnnnnnnnnnnnnnnnnnnnnnnnnnnnnnnnnnnnnnnnnnnnnnnnnnnnnnnnnnnnnnnnnnnnnnnnnnnnnnnnnnnnnnnnnnnnnnnnnnnnnnnnnnnnnnnnnnnnnnnnnnnnnnnnnnnnnnnnnnnnnnnnnnnnnnnnnnnnnnnnnnnnnnnnnnnnnnnnnnnnnnnnnnnnnnnnnnnnnnnnnnnnnnnnnnnnnnnnnnnnnnnnnnnnnnnnnnnnnnnnnnnnnnnnnnnnnnnnnnnnnnnnnnnnnnnnnnnnnnnnnnnnnnnnnnnnnnnnnnnnnnnnnnnnnnnnnnnnnnnnnnnnnnnnnnnnnnnnnnnnnnnnnnnnnnnnnnnnnnnnnnnnnnnnnnnnnnnnnnnnnnnnnnnnnnnnnnnnnnnnnnnnnnnnnnnnnnnnnnnnnnnnnnnnnnnnnnnnnnnnnnnnnnnnnnnnnnnnnnnnnnnnnnnnnnnnnnnnnnnnnnnnnnnnnnnnnnnnnnnnnnnnnnnnnnnnnnnnnnnnnnnnnnnnnnnnnnnnnnnnnnnnnnnnnnnnnnnnnnnnnnnnnnnnnnnnnnnnnnnnnnnnnnnnnnnnnnnnnnnnnnnnnnnnnnnnnnnnnnnnnnnnnnnnnnnnnnnnnnnnnnnnnnnnnnnnnnnnnnnnnnnnnnnnnnnnnnnnnnnnnnnnnnnnnnnnnnnnnnnnnnnnnnnnnnnnnnnnnnnnnnnnnnnnnnnnnnnnnnnnnnnnnnnnnnnnnnnnnnnnnnnnnnnnnnnnnnnnnnnnnnnnnnnnnnnnnnnnnnnnnnnnnnnnnnnnnnnnnnnnnnnnnnnnnnnnnnnnnnnnnnnnnnnnnnnnnnnnnnnnnnnnnnnnnnnnnnnnnnnnnnnnnnnnnnnnnnnnnnnnnnnnnnnnnnnnnnnnnnnnnnnnnnnnnnnnnnnnnnnnnnnnnnnnnnnnnnnnnnnnnnnnnnnnnnnnnnnnnnnnnnnnnnnnnnnnnnnnnnnnnnnnnnnnnnnnnnnnnnnnnnnnnnnnnnnnnnnnnnnnnnnnnnnnnnnnnnnnnnnnnnnnnnnnnnnnnnnnnnnnnnnnnnnnnnnnnnnnnnnnnnnnnnnnnnnnnnnnnnnnnnnnnnnnnnnnnnnnnnnnnnnnnnnnnnnnnnnnnnnnnnnnnnnnnnnnnnnnnnnnnnnnnnnnnnnnnnnnnnnnnnnnnnnnnnnnnnnnnnnnnnnnnnnnnnnnnnnnnnnnnnnnnnnnnnnnnnnnnnnnnnnnnnnnnnnnnnnnnnnnnnnnnnnnnnnnnnnnnnnnnnnnnnnnnnnnnnnnnnnnnnnnnnnnnnnnnnnnnnnnnnnnnnnnnnnnnnnnnnnnnnnnnnnnnnnnnnnnnnnnnnnnnnnnnnnnnnnnnnnnnnnnnnnnnnnnnnnnnnnnnnnnnnnnnnnnnnnnnnnnnnnnnnnnnnnnnnnnnnnnnnnnnnnnnnnnnnnnnnnnnnnnnnnnnnnnnnnnnnnnnnnnnnnnnnnnnnnnnnnnnnnnnnnnnnnnnnnnnnnnnnnnnnnnnnnnnnnnnnnnnnnnnnnnnnnnnnnnnnnnnnnnnnnnnnnnnnnnnnnnnnnnnnnnnnnnnnnnnnnnnnnnnnnnnnnnnnnnnnnnnnnnnnnnnnnnnnnnnnnnnnnnnnnnnnnnnnnnnnnnnnnnnnnnnnnnnnnnnnnnnnnnnnnnnnnnnnnnnnnnnnnnnnnnnnnnnnnnnnnnnnnnnnnnnnnnnnnnnnnnnnnnnnnnnnnnnnnnnnnnnnnnnnnnnnnnnnnnnnnnnnnnnnnnnnnnnnnnnnnnnnnnnnnnnnnnnnnnnnnnnnnnnnnnnnnnnnnnnnnnnnnnnnnnnnnnnnnnnnnnnnnnnnnnnnnnnnnnnnnnnnnnnnnnnnnnnnnnnnnnnnnnnnnnnnnnnnnnnnnnnnnnnnnnnnnnnnnnnnnnnnnnnnnnnnnnnnnnnnnnnnnnnnnnnnnnnnnnnnnnnnnnnnnnnnnnnnnnnnnnnnnnnnnnnnnnnnnnnnnnnnnnnnnnnnnnnnnnnnnnnnnnnnnnnnnnnnnnnnnnnnnnnnnnnnnnnnnnnnnnnnnnnnnnnnnnnnnnnnnnnnnnnnnnnnnnnnnnnnnnnnnnnnnnnnnnnnnnnnnnnnnnnnnnnnnnnnnnnnnnnnnnnnnnnnnnnnnnnnnnnnnnnnnnnnnnnnnnnnnnnnnnnnnnnnnnnnnnnnnnnnnnnnnnnnnnnnnnnnnnnnnnnnnnnnnnnnnnnnnnnnnnnnnnnnnnnnnnnnnnnnnnnnnnnnnnnnnnnnnnnnnnnnnnnnnnnnnnnnnnnnnnnnnnnnnnnnnnnnnnnnnnnnnnnnnnnnnnnnnnnnnnnnnnnnnnnnnnnnnnnnnnnnnnnnnnnnnnnnnnnnnnnnnnnnnnnnnnnnnnnnnnnnnnnnnnnnnnnnnnnnnnnnnnnnnnnnnnnnnnnnnnnnnnnnnnnnnnnnnnnnnnnnnnnnnnnnnnnnnnnnnnnnnnnnnnnnnnnnnnnnnnnnnnnnnnnnnnnnnnnnnnnnnnnnnnnnnnnnnnnnnnnnnnnnnnnnnnnnnnnnnnnnnnnnnnnnnnnnnnnnnnnnnnnnnnnnnnnnnnnnnnnnnnnnnnnnnnnnnnnnnnnnnnnnnnnnnnnnnnnnnnnnnnnnnnnnnnnnnnnnnnnnnnnnnnnnnnnnnnnnnnnnnnnnnnnnnnnnnnnnnnnnnnnnnnnnnnnnnnnnnnnnnnnnnnnnnnnnnnnnnnnnnnnnnnnnnnnnnnnnnnnnnnnnnnnnnnnnnnnnnnnnnnnnnnnnnnnnnnnnnnnnnnnnnnnnnnnnnnnnnnnnnnnnnnnnnnnnnnnnnnnnnnnnnnnnnnnnnnnnnnnnnnnnnnnnnnnnnnnnnnnnnnnnnnnnnnnnnnnnnnnnnnnnnnnnnnnnnnnnnnnnnnnnnnnnnnnnnnnnnnnnnnnnnnnnnnnnnnnnnnnnnnnnnnnnnnnnnnnnnnnnnnnnnnnnnnnnnnnnnnnnnnnnnnnnnnnnnnnnnnnnnnnnnnnnnnnnnnnnnnnnnnnnnnnnnnnnnnnnnnnnnnnnnnnnnnnnnnnnnnnnnnnnnnnnnnnnnnnnnnnnnnnnnnnnnnnnnnnnnnnnnnnnnnnnnnnnnnnnnnnnnnnnnnnnnnnnnnnnnnnnnnnnnnnnnnnnnnnnnnnnnnnnnnnnnnnnnnnnnnnnnnnnnnnnnnnnnnnnnnnnnnnnnnnnnnnnnnnnnnnnnnnnnnnnnnnnnnnnnnnnnnnnnnnnnnnnnnnnnnnnnnnnnnnnnnnnnnnnnnnnnnnnnnnnnnnnnnnnnnnnnnnnnnnnnnnnnnnnnnnnnnnnnnnnnnnnnnnnnnnnnnnnnnnnnnnnnnnnnnnnnnnnnnnnnnnnnnnnnnnnnnnnnnnnnnnnnnnnnnnnnnnnnnnnnnnnnnnnnnnnnnnnnnnnnnnnnnnnnnnnnnnnnnnnnnnnnnnnnnnnnnnnnnnnnnnnnnnnnnnnnnnnnnnnnnnnnnnnnnnnnnnnnnnnnnnnnnnnnnnnnnnnnnnnnnnnnnnnnnnnnnnnnnnnnnnnnnnnnnnnnnnnnnnnnnnnnnnnnnnnnnnnnnnnnnnnnnnnnnnnnnnnnnnnnnnnnnnnnnnnnnnnnnnnnnnnnnnnnnnnnnnnnnnnnnnnnnnnnnnnnnnnnnnnnnnnnnnnnnnnnnnnnnnnnnnnnnnnnnnnnnnnnnnnnnnnnnnnnnnnnnnnnnnnnnnnnnnnnnnnnnnnnnnnnnnnnnnnnnnnnnnnnnnnnnnnnnnnnnnnnnnnnnnnnnnnnnnnnnnnnnnnnnnnnnnnnnnnnnnnnnnnnnnnnnnnnnnnnnnnnnnnnnnnnnnnnnnnnnnnnnnnnnnnnnnnnnnnnnnnnnnnnnnnnnnnnnnnnnnnnnnnnnnnnnnnnnnnnnnnnnnnnnnnnnnnnnnnnnnnnnnnnnnnnnnnnnnnnnnnnnnnnnnnnnnnnnnnnnnnnnnnnnnnnnnnnnnnnnnnnnnnnnnnnnnnnnnnnnnnnnnnnnnnnnnnnnnnnnnnnnnnnnnnnnnnnnnnnnnnnnnnnnnnnnnnnnnnnnnnnnnnnnnnnnnnnnnnnnnnnnnnnnnnnnnnnnnnnnnnnnnnnnnnnnnnnnnnnnnnnnnnnnnnnnnnnnnnnnnnnnnnnnnnnnnnnnnnnnnnnnnnnnnnnnnnnnnnnnnnnnnnnnnnnnnnnnnnnnnnnnnnnnnnnnnnnnnnnnnnnnnnnnnnnnnnnnnnnnnnnnnnnnnnnnnnnnnnnnnnnnnnnnnnnnnnnnnnnnnnnnnnnnnnnnnnnnnnnnnnnnnnnnnnnnnnnnnnnnnnnnnnnnnnnnnnnnnnnnnnnnnnnnnnnnnnnnnnnnnnnnnnnnnnnnnnnnnnnnnnnnnnnnnnnnnnnnnnnnnnnnnnnnnnnnnnnnnnnnnnnnnnnnnnnnnnnnnnnnnnnnnnnnnnnnnnnnnnnnnnnnnnnnnnnnnnnnnnnnnnnnnnnnnnnnnnnnnnnnnnnnnnnnnnnnnnnnnnnnnnnnnnnnnnnnnnnnnnnnnnnnnnnnnnnnnnnnnnnnnnnnnnnnnnnnnnnnnnnnnnnnnnnnnnnnnnnnnnnnnnnnnnnnnnnnnnnnnnnnnnnnnnnnnnnnnnnnnnnnnnnnnnnnnnnnnnnnnnnnnnnnnnnnnnnnnnnnnnnnnnnnnnnnnnnnnnnnnnnnnnnnnnnnnnnnnnnnnnnnnnnnnnnnnnnnnnnnnnnnnnnnnnnnnnnnnnnnnnnnnnnnnnnnnnnnnnnnnnnnnnnnnnnnnnnnnnnnnnnnnnnnnnnnnnnnnnnnnnnnnnnnnnnnnnnnnnnnnnnnnnnnnnnnnnnnnnnnnnnnnnnnnnnnnnnnnnnnnnnnnnnnnnnnnnnnnnnnnnnnnnnnnnnnnnnnnnnnnnnnnnnnnnnnnnnnnnnnnnnnnnnnnnnnnnnnnnnnnnnnnnnnnnnnnnnnnnnnnnnnnnnnnnnnnnnnnnnnnnnnnnnnnnnnnnnnnnnnnnnnnnnnnnnnnnnnnnnnnnnnnnnnnnnnnnnnnnnnnnnnnnnnnnnnnnnnnnnnnnnnnnnnnnnnnnnnnnnnnnnnnnnnnnnnnnnnnnnnnnnnnnnnnnnnnnnnnnnnnnnnnnnnnnnnnnnnnnnnnnnnnnnnnnnnnnnnnnnnnnnnnnnnnnnnnnnnnnnnnnnnnnnnnnnnnnnnnnnnnnnnnnnnnnnnnnnnnnnnnnnnnnnnnnnnnnnnnnnnnnnnnnnnnnnnnnnnnnnnnnnnnnnnnnnnnnnnnnnnnnnnnnnnnnnnnnnnnnnnnnnnnnnnnnnnnnnnnnnnnnnnnnnnnnnnnnnnnnnnnnnnnnnnnnnnnnnnnnnnnnnnnnnnnnnnnnnnnnnnnnnnnnnnnnnnnnnnnnnnnnnnnnnnnnnnnnnnnnnnnnnnnnnnnnnnnnnnnnnnnnnnnnnnnnnnnnnnnnnnnnnnnnnnnnnnnnnnnnnnnnnnnnnnnnnnnnnnnnnnnnnnnnnnnnnnnnnnnnnnnnnnnnnnnnnnnnnnnnnnnnnnnnnnnnnnnnnnnnnnnnnnnnnnnnnnnnnnnnnnnnnnnnnnnnnnnnnnnnnnnnnnnnnnnnnnnnnnnnnnnnnnnnnnnnnnnnnnnnnnnnnnnnnnnnnnnnnnnnnnnnnnnnnnnnnnnnnnnnnnnnnnnnnnnnnnnnnnnnnnnnnnnnnnnnnnnnnnnnnnnnnnnnnnnnnnnnnnnnnnnnnnnnnnnnnnnnnnnnnnnnnnnnnnnnnnnnnnnnnnnnnnnnnnnnnnnnnnnnnnnnnnnnnnnnnnnnnnnnnnnnnnnnnnnnnnnnnnnnnnnnnnnnnnnnnnnnnnnnnnnnnnnnnnnnnnnnnnnnnnnnnnnnnnnnnnnnnnnnnnnnnnnnnnnnnnnnnnnnnnnnnnnnnnnnnnnnnnnnnnnnnnnnnnnnnnnnnnnnnnnnnnnnnnnnnnnnnnnnnnnnnnnnnnnnnnnnnnnnnnnnnnnnnnnnnnnnnnnnnnnnnnnnnnnnnnnnnnnnnnnnnnnnnnnnnnnnnnnnnnnnnnnnnnnnnnnnnnnnnnnnnnnnnnnnnnnnnnnnnnnnnnnnnnnnnnnnnnnnnnnnnnnnnnnnnnnnnnnnnnnnnnnnnnnnnnnnnnnnnnnnnnnnnnnnnnnnnnnnnnnnnnnnnnnnnnnnnnnnnnnnnnnnnnnnnnnnnnnnnnnnnnnnnnnnnnnnnnnnnnnnnnnnnnnnnnnnnnnnnnnnnnnnnnnnnnnnnnnnnnnnnnnnnnnnnnnnnnnnnnnnnnnnnnnnnnnnnnnnnnnnnnnnnnnnnnnnnnnnnnnnnnnnnnnnnnnnnnnnnnnnnnnnnnnnnnnnnnnnnnnnnnnnnnnnnnnnnnnnnnnnnnnnnnnnnnnnnnnnnnnnnnnnnnnnnnnnnnnnnnnnnnnnnnnnnnnnnnnnnnnnnnnnnnnnnnnnnnnnnnnnnnnnnnnnnnnnnnnnnnnnnnnnnnnnnnnnnnnnnnnnnnnnnnnnnnnnnnnnnnnnnnnnnnnnnnnnnnnnnnnnnnnnnnnnnnnnnnnnnnnnnnnnnnnnnnnnnnnnnnnnnnnnnnnnnnnnnnnnnnnnnnnnnnnnnnnnnnnnnnnnnnnnnnnnnnnnnnnnnnnnnnnnnnnnnnnnnnnnnnnnnnnnnnnnnnnnnnnnnnnnnnnnnnnnnnnnnnnnnnnnnnnnnnnnnnnnnnnnnnnnnnnnnnnnnnnnnnnnnnnnnnnnnnnnnnnnnnnnnnnnnnnnnnnnnnnnnnnnnnnnnnnnnnnnnnnnnnnnnnnnnnnnnnnnnnnnnnnnnnnnnnnnnnnnnnnnnnnnnnnnnnnnnnnnnnnnnnnnnnnnnnnnnnnnnnnnnnnnnnnnnnnnnnnnnnnnnnnnnnnnnnnnnnnnnnnnnnnnnnnnnnnnnnnnnnnnnnnnnnnnnnnnnnnnnnnnnnnnnnnnnnnnnnnnnnnnnnnnnnnnnnnnnnnnnnnnnnnnnnnnnnnnnnnnnnnnnnnnnnnnnnnnnnnnnnnnnnnnnnnnnnnnnnnnnnnnnnnnnnnnnnnnnnnnnnnnnnnnnnnnnnnnnnnnnnnnnnnnnnnnnnnnnnnnnnnnnnnnnnnnnnnnnnnnnnnnnnnnnnnnnnnnnnnnnnnnnnnnnnnnnnnnnnnnnnnnnnnnnnnnnnnnnnnnnnnnnnnnnnnnnnnnnnnnnnnnnnnnnnnnnnnnnnnnnnnnnnnnnnnnnnnnnnnnnnnnnnnnnnnnnnnnnnnnnnnnnnnnnnnnnnnnnnnnnnnnnnnnnnnnnnnnnnnnnnnnnnnnnnnnnnnnnnnnnnnnnnnnnnnnnnnnnnnnnnnnnnnnnnnnnnnnnnnnnnnnnnnnnnnnnnnnnnnnnnnnnnnnnnnnnnnnnnnnnnnnnnnnnnnnnnnnnnnnnnnnnnnnnnnnnnnnnnnnnnnnnnnnnnnnnnnnnnnnnnnnnnnnnnnnnnnnnnnnnnnnnnnnnnnnnnnnnnnnnnnnnnnnnnnnnnnnnnnnnnnnnnnnnnnnnnnnnnnnnnnnnnnnnnnnnnnnnnnnnnnnnnnnnnnnnnnnnnnnnnnnnnnnnnnnnnnnnnnnnnnnnnnnnnnnnnnnnnnnnnnnnnnnnnnnnnnnnnnnnnnnnnnnnnnnnnnnnnnnnnnnnnnnnnnnnnnnnnnnnnnnnnnnnnnnnnnnnnnnnnnnnnnnnnnnnnnnnnnnnnnnnnnnnnnnnnnnnnnnnnnnnnnnnnnnnnnnnnnnnnnnnnnnnnnnnnnnnnnnnnnnnnnnnnnnnnnnnnnnnnnnnnnnnnnnnnnnnnnnnnnnnnnnnnnnnnnnnnnnnnnnnnnnnnnnnnnnnnnnnnnnnnnnnnnnnnnnnnnnnnnnnnnnnnnnnnnnnnnnnnnnnnnnnnnnnnnnnnnnnnnnnnnnnnnnnnnnnnnnnnnnnnnnnnnnnnnnnnnnnnnnnnnnnnnnnnnnnnnnnnnnnnnnnnnnnnnnnnnnnnnnnnnnnnnnnnnnnnnnnnnnnnnnnnnnnnnnnnnnnnnnnnnnnnnnnnnnnnnnnnnnnnnnnnnnnnnnnnnnnnnnnnnnnnnnnnnnnnnnnnnnnnnnnnnnnnnnnnnnnnnnnnnnnnnnnnnnnnnnnnnnnnnnnnnnnnnnnnnnnnnnnnnnnnnnnnnnnnnnnnnnnnnnnnnnnnnnnnnnnnnnnnnnnnnnnnnnnnnnnnnnnnnnnnnnnnnnnnnnnnnnnnnnnnnnnnnnnnnnnnnnnnnnnnnnnnnnnnnnnnnnnnnnnnnnnnnnnnnnnnnnnnnnnnnnnnnnnnnnnnnnnnnnnnnnnnnnnnnnnnnnnnnnnnnnnnnnnnnnnnnnnnnnnnnnnnnnnnnnnnnnnnnnnnnnnnnnnnnnnnnnnnnnnnnnnnnnnnnnnnnnnnnnnnnnnnnnnnnnnnnnnnnnnnnnnnnnnnnnnnnnnnnnnnnnnnnnnnnnnnnnnnnnnnnnnnnnnnnnnnnnnnnnnnnnnnnnnnnnnnnnnnnnnnnnnnnnnnnnnnnnnnnnnnnnnnnnnnnnnnnnnnnnnnnnnnnnnnnnnnnnnnnnnnnnnnnnnnnnnnnnnnnnnnnnnnnnnnnnnnnnnnnnnnnnnnnnnnnnnnnnnnnnnnnnnnnnnnnnnnnnnnnnnnnnnnnnnnnnnnnnnnnnnnnnnnnnnnnnnnnnnnnnnnnnnnnnnnnnnnnnnnnnnnnnnnnnnnnnnnnnnnnnnnnnnnnnnnnnnnnnnnnnnnnnnnnnnnnnnnnnnnnnnnnnnnnnnnnnnnnnnnnnnnnnnnnnnnnnnnnnnnnnnnnnnnnnnnnnnnnnnnnnnnnnnnnnnnnnnnnnnnnnnnnnnnnnnnnnnnnnnnnnnnnnnnnnnnnnnnnnnnnnnnnnnnnnnnnnnnnnnnnnnnnnnnnnnnnnnnnnnnnnnnnnnnnnnnnnnnnnnnnnnnnnnnnnnnnnnnnnnnnnnnnnnnnnnnnnnnnnnnnnnnnnnnnnnnnnnnnnnnnnnnnnnnnnnnnnnnnnnnnnnnnnnnnnnnnnnnnnnnnnnnnnnnnnnnnnnnnnnnnnnnnnnnnnnnnnnnnnnnnnnnnnnnnnnnnnnnnnnnnnnnnnnnnnnnnnnnnnnnnnnnnnnnnnnnnnnnnnnnnnnnnnnnnnnnnnnnnnnnnnnnnnnnnnnnnnnnnnnnnnnnnnnnnnnnnnnnnnnnnnnnnnnnnnnnnnnnnnnnnnnnnnnnnnnnnnnnnnnnnnnnnnnnnnnnnnnnnnnnnnnnnnnnnnnnnnnnnnnnnnnnnnnnnnnnnnnnnnnnnnnnnnnnnnnnnnnnnnnnnnnnnnnnnnnnnnnnnnnnnnnnnnnnnnnnnnnnnnnnnnnnnnnnnnnnnnnnnnnnnnnnnnnnnnnnnnnnnnnnnnnnnnnnnnnnnnnnnnnnnnnnnnnnnnnnnnnnnnnnnnnnnnnnnnnnnnnnnnnnnnnnnnnnnnnnnnnnnnnnnnnnnnnnnnnnnnnnnnnnnnnnnnnnnnnnnnnnnnnnnnnnnnnnnnnnnnnnnnnnnnnnnnnnnnnnnnnnnnnnnnnnnnnnnnnnnnnnnnnnnnnnnnnnnnnnnnnnnnnnnnnnnnnnnnnnnnnnnnnnnnnnnnnnnnnnnnnnnnnnnnnnnnnnnnnnnnnnnnnnnnnnnnnnnnnnnnnnnnnnnnnnnnnnnnnnnnnnnnnnnnnnnnnnnnnnnnnnnnnnnnnnnnnnnnnnnnnnnnnnnnnnnnnnnnnnnnnnnnnnnnnnnnnnnnnnnnnnnnnnnnnnnnnnnnnnnnnnnnnnnnnnnnnnnnnnnnnnnnnnnnnnnnnnnnnnnnnnnnnnnnnnnnnnnnnnnnnnnnnnnnnnnnnnnnnnnnnnnnnnnnnnnnnnnnnnnnnnnnnnnnnnnnnnnnnnnnnnnnnnnnnnnnnnnnnnnnnnnnnnnnnnnnnnnnnnnnnnnnnnnnnnnnnnnnnnnnnnnnnnnnnnnnnnnnnnnnnnnnnnnnnnnnnnnnnnnnnnnnnnnnnnnnnnnnnnnnnnnnnnnnnnnnnnnnnnnnnnnnnnnnnnnnnnnnnnnnnnnnnnnnnnnnnnnnnnnnnnnnnnnnnnnnnnnnnnnnnnnnnnnnnnnnnnnnnnnnnnnnnnnnnnnnnnnnnnnnnnnnnnnnnnnnnnnnnnnnnnnnnnnnnnnnnnnnnnnnnnnnnnnnnnnnnnnnnnnnnnnnnnnnnnnnnnnnnnnnnnnnnnnnnnnnnnnnnnnnnnnnnnnnnnnnnnnnnnnnnnnnnnnnnnnnnnnnnnnnnnnnnnnnnnnnnnnnnnnnnnnnnnnnnnnnnnnnnnnnnnnnnnnnnnnnnnnnnnnnnnnnnnnnnnnnnnnnnnnnnnnnnnnnnnnnnnnnnnnnnnnnnnnnnnnnnnnnnnnnnnnnnnnnnnnnnnnnnnnnnnnnnnnnnnnnnnnnnnnnnnnnnnnnnnnnnnnnnnnnnnnnnnnnnnnnnnnnnnnnnnnnnnnnnnnnnnnnnnnnnnnnnnnnnnnnnnnnnnnnnnnnnnnnnnnnnnnnnnnnnnnnnnnnnnnnnnnnnnnnnnnnnnnnnnnnnnnnnnnnnnnnnnnnnnnnnnnnnnnnnnnnnnnnnnnnnnnnnnnnnnnnnnnnnnnnnnnnnnnnnnnnnnnnnnnnnnnnnnnnnnnnnnnnnnnnnnnnnnnnnnnnnnnnnnnnnnnnnnnnnnnnnnnnnnnnnnnnnnnnnnnnnnnnnnnnnnnnnnnnnnnnnnnnnnnnnnnnnnnnnnnnnnnnnnnnnnnnnnnnnnnnnnnnnnnnnnnnnnnnnnnnnnnnnnnnnnnnnnnnnnnnnnnnnnnnnnnnnnnnnnnnnnnnnnnnnnnnnnnnnnnnnnnnnnnnnnnnnnnnnnnnnnnnnnnnnnnnnnnnnnnnnnnnnnnnnnnnnnnnnnnnnnnnnnnnnnnnnnnnnnnnnnnnnnnnnnnnnnnnnnnnnnnnnnnnnnnnnnnnnnnnnnnnnnnnnnnnnnnnnnnnnnnnnnnnnnnnnnnnnnnnnnnnnnnnnnnnnnnnnnnnnnnnnnnnnnnnnnnnnnnnnnnnnnnnnnnnnnnnnnnnnnnnnnnnnnnnnnnnnnnnnnnnnnnnnnnnnnnnnnnnnnnnnnnnnnnnnnnnnnnnnnnnnnnnnnnnnnnnnnnnnnnnnnnnnnnnnnnnnnnnnnnnnnnnnnnnnnnnnnnnnnnnnnnnnnnnnnnnnnnnnnnnnnnnnnnnnnnnnnnnnnnnnnnnnnnnnnnnnnnnnnnnnnnnnnnnnnnnnnnnnnnnnnnnnnnnnnnnnnnnnnnnnnnnnnnnnnnnnnnnnnnnnnnnnnnnnnnnnnnnnnnnnnnnnnnnnnnnnnnnnnnnnnnnnnnnnnnnnnnnnnnnnnnnnnnnnnnnnnnnnnnnnnnnnnnnnnnnnnnnnnnnnnnnnnnnnnnnnnnnnnnnnnnnnnnnnnnnnnnnnnnnnnnnnnnnnnnnnnnnnnnnnnnnnnnnnnnnnnnnnnnnnnnnnnnnnnnnnnnnnnnnnnnnnnnnnnnnnnnnnnnnnnnnnnnnnnnnnnnnnnnnnnnnnnnnnnnnnnnnnnnnnnnnnnnnnnnnnnnnnnnnnnnnnnnnnnnnnnnnnnnnnnnnnnnnnnnnnnnnnnnnnnnnnnnnnnnnnnnnnnnnnnnnnnnnnnnnnnnnnnnnnnnnnnnnnnnnnnnnnnnnnnnnnnnnnnnnnnnnnnnnnnnnnnnnnnnnnnnnnnnnnnnnnnnnnnnnnnnnnnnnnnnnnnnnnnnnnnnnnnnnnnnnnnnnnnnnnnnnnnnnnnnnnnnnnnnnnnnnnnnnnnnnnnnnnnnnnnnnnnnnnnnnnnnnnnnnnnnnnnnnnnnnnnnnnnnnnnnnnnnnnnnnnnnnnnnnnnnnnnnnnnnnnnnnnnnnnnnnnnnnnnnnnnnnnnnnnnnnnnnnnnnnnnnnnnnnnnnnnnnnnnnnnnnnnnnnnnnnnnnnnnnnnnnnnnnnnnnnnnnnnnnnnnnnnnnnnnnnnnnnnnnnnnnnnnnnnnnnnnnnnnnnnnnnnnnnnnnnnnnnnnnnnnnnnnnnnnnnnnnnnnnnnnnnnnnnnnnnnnnnnnnnnnnnnnnnnnnnnnnnnnnnnnnnnnnnnnnnnnnnnnnnnnnnnnnnnnnnnnnnnnnnnnnnnnnnnnnnnnnnnnnnnnnnnnnnnnnnnnnnnnnnnnnnnnnnnnnnnnnnnnnnnnnnnnnnnnnnnnnnnnnnnnnnnnnnnnnnnnnnnnnnnnnnnnnnnnnnnnnnnnnnnnnnnnnnnnnnnnnnnnnnnnnnnnnnnnnnnnnnnnnnnnnnnnnnnnnnnnnnnnnnnnnnnnnnnnnnnnnnnnnnnnnnnnnnnnnnnnnnnnnnnnnnnnnnnnnnnnnnnnnnnnnnnnnnnnnnnnnnnnnnnnnnnnnnnnnnnnnnnnnnnnnnnnnnnnnnnnnnnnnnnnnnnnnnnnnnnnnnnnnnnnnnnnnnnnnnnnnnnnnnnnnnnnnnnnnnnnnnnnnnnnnnnnnnnnnnnnnnnnnnnnnnnnnnnnnnnnnnnnnnnnnnnnnnnnnnnnnnnnnnnnnnnnnnnnnnnnnnnnnnnnnnnnnnnnnnnnnnnnnnnnnnnnnnnnnnnnnnnnnnnnnnnnnnnnnnnnnnnnnnnnnnnnnnnnnnnnnnnnnnnnnnnnnnnnnnnnnnnnnnnnnnnnnnnnnnnnnnnnnnnnnnnnnnnnnnnnnnnnnnnnnnnnnnnnnnnnnnnnnnnnnnnnnnnnnnnnnnnnnnnnnnnnnnnnnnnnnnnnnnnnnnnnnnnnnnnnnnnnnnnnnnnnnnnnnnnnnnnnnnnnnnnnnnnnnnnnnnnnnnnnnnnnnnnnnnnnnnnnnnnnnnnnnnnnnnnnnnnnnnnnnnnnnnnnnnnnnnnnnnnnnnnnnnnnnnnnnnnnnnnnnnnnnnnnnnnnnnnnnnnnnnnnnnnnnnnnnnnnnnnnnnnnnnnnnnnnnnnnnnnnnnnnnnnnnnnnnnnnnnnnnnnnnnnnnnnnnnnnnnnnnnnnnnnnnnnnnnnnnnnnnnnnnnnnnnnnnnnnnnnnnnnnnnnnnnnnnnnnnnnnnnnnnnnnnnnnnnnnnnnnnnnnnnnnnnnnnnnnnnnnnnnnnnnnnnnnnnnnnnnnnnnnnnnnnnnnnnnnnnnnnnnnnnnnnnnnnnnnnnnnnnnnnnnnnnnnnnnnnnnnnnnnnnnnnnnnnnnnnnnnnnnnnnnnnnnnnnnnnnnnnnnnnnnnnnnnnnnnnnnnnnnnnnnnnnnnnnnnnnnnnnnnnnnnnnnnnnnnnnnnnnnnnnnnnnnnnnnnnnnnnnnnnnnnnnnnnnnnnnnnnnnnnnnnnnnnnnnnnnnnnnnnnnnnnnnnnnnnnnnnnnnnnnnnnnnnnnnnnnnnnnnnnnnnnnnnnnnnnnnnnnnnnnnnnnnnnnnnnnnnnnnnnnnnnnnnnnnnnnnnnnnnnnnnnnnnnnnnnnnnnnnnnnnnnnnnnnnnnnnnnnnnnnnnnnnnnnnnnnnnnnnnnnnnnnnnnnnnnnnnnnnnnnnnnnnnnnnnnnnnnnnnnnnnnnnnnnnnnnnnnnnnnnnnnnnnnnnnnnnnnnnnnnnnnnnnnnnnnnnnnnnnnnnnnnnnnnnnnnnnnnnnnnnnnnnnnnnnnnnnnnnnnnnnnnnnnnnnnnnnnnnnnnnnnnnnnnnnnnnnnnnnnnnnnnnnnnnnnnnnnnnnnnnnnnnnnnnnnnnnnnnnnnnnnnnnnnnnnnnnnnnnnnnnnnnnnnnnnnnnnnnnnnnnnnnnnnnnnnnnnnnnnnnnnnnnnnnnnnnnnnnnnnnnnnnnnnnnnnnnnnnnnnnnnnnnnnnnnnnnnnnnnnnnnnnnnnnnnnnnnnnnnnnnnnnnnnnnnnnnnnnnnnnnnnnnnnnnnnnnnnnnnnnnnnnnnnnnnnnnnnnnnnnnnnnnnnnnnnnnnnnnnnnnnnnnnnnnnnnnnnnnnnnnnnnnnnnnnnnnnnnnnnnnnnnnnnnnnnnnnnnnnnnnnnnnnnnnnnnnnnnnnnnnnnnnnnnnnnnnnnnnnnnnnnnnnnnnnnnnnnnnnnnnnnnnnnnnnnnnnnnnnnnnnnnnnnnnnnnnnnnnnnnnnnnnnnnnnnnnnnnnnnnnnnnnnnnnnnnnnnnnnnnnnnnnnnnnnnnnnnnnnnnnnnnnnnnnnnnnnnnnnnnnnnnnnnnnnnnnnnnnnnnnnnnnnnnnnnnnnnnnnnnnnnnnnnnnnnnnnnnnnnnnnnnnnnnnnnnnnnnnnnnnnnnnnnnnnnnnnnnnnnnnnnnnnnnnnnnnnnnnnnnnnnnnnnnnnnnnnnnnnnnnnnnnnnnnnnnnnnnnnnnnnnnnnnnnnnnnnnnnnnnnnnnnnnnnnnnnnnnnnnnnnnnnnnnnnnnnnnnnnnnnnnnnnnnnnnnnnnnnnnnnnnnnnnnnnnnnnnnnnnnnnnnnnnnnnnnnnnnnnnnnnnnnnnnnnnnnnnnnnnnnnnnnnnnnnnnnnnnnnnnnnnnnnnnnnnnnnnnnnnnnnnnnnnnnnnnnnnnnnnnnnnnnnnnnnnnnnnnnnnnnnnnnnnnnnnnnnnnnnnnnnnnnnnnnnnnnnnnnnnnnnnnnnnnnnnnnnnnnnnnnnnnnnnnnnnnnnnnnnnnnnnnnnnnnnnnnnnnnnnnnnnnnnnnnnnnnnnnnnnnnnnnnnnnnnnnnnnnnnnnnnnnnnnnnnnnnnnnnnnnnnnnnnnnnnnnnnnnnnnnnnnnnnnnnnnnnnnnnnnnnnnnnnnnnnnnnnnnnnnnnnnnnnnnnnnnnnnnnnnnnnnnnnnnnnnnnnnnnnnnnnnnnnnnnnnnnnnnnnnnnnnnnnnnnnnnnnnnnnnnnnnnnnnnnnnnnnnnnnnnnnnnnnnnnnnnnnnnnnnnnnnnnnnnnnnnnnnnnnnnnnnnnnnnnnnnnnnnnnnnnnnnnnnnnnnnnnnnnnnnnnnnnnnnnnnnnnnnnnnnnnnnnnnnnnnnnnnnnnnnnnnnnnnnnnnnnnnnnnnnnnnnnnnnnnnnnnnnnnnnnnnnnnnnnnnnnnnnnnnnnnnnnnnnnnnnnnnnnnnnnnnnnnnnnnnnnnnnnnnnnnnnnnnnnnnnnnnnnnnnnnnnnnnnnnnnnnnnnnnnnnnnnnnnnnnnnnnnnnnnnnnnnnnnnnnnnnnnnnnnnnnnnnnnnnnnnnnnnnnnnnnnnnnnnnnnnnnnnnnnnnnnnnnnnnnnnnnnnnnnnnnnnnnnnnnnnnnnnnnnnnnnnnnnnnnnnnnnnnnnnnnnnnnnnnnnnnnnnnnnnnnnnnnnnnnnnnnnnnnnnnnnnnnnnnnnnnnnnnnnnnnnnnnnnnnnnnnnnnnnnnnnnnnnnnnnnnnnnnnnnnnnnnnnnnnnnnnnnnnnnnnnnnnnnnnnnnnnnnnnnnnnnnnnnnnnnnnnnnnnnnnnnnnnnnnnnnnnnnnnnnnnnnnnnnnnnnnnnnnnnnnnnnnnnnnnnnnnnnnnnnnnnnnnnnnnnnnnnnnnnnnnnnnnnnnnnnnnnnnnnnnnnnnnnnnnnnnnnnnnnnnnnnnnnnnnnnnnnnnnnnnnnnnnnnnnnnnnnnnnnnnnnnnnnnnnnnnnnnnnnnnnnnnnnnnnnnnnnnnnnnnnnnnnnnnnnnnnnnnnnnnnnnnnnnnnnnnnnnnnnnnnnnnnnnnnnnnnnnnnnnnnnnnnnnnnnnnnnnnnnnnnnnnnnnnnnnnnnnnnnnnnnnnnnnnnnnnnnnnnnnnnnnnnnnnnnnnnnnnnnnnnnnnnnnnnnnnnnnnnnnnnnnnnnnnnnnnnnnnnnnnnnnnnnnnnnnnnnnnnnnnnnnnnnnnnnnnnnnnnnnnnnnnnnnnnnnnnnnnnnnnnnnnnnnnnnnnnnnnnnnnnnnnnnnnnnnnnnnnnnnnnnnnnnnnnnnnnnnnnnnnnnnnnnnnnnnnnnnnnnnnnnnnnnnnnnnnnnnnnnnnnnnnnnnnnnnnnnnnnnnnnnnnnnnnnnnnnnnnnnnnnnnnnnnnnnnnnnnnnnnnnnnnnnnnnnnnnnnnnnnnnnnnnnnnnnnnnnnnnnnnnnnnnnnnnnnnnnnnnnnnnnnnnnnnnnnnnnnnnnnnnnnnnnnnnnnnnnnnnnnnnnnnnnnnnnnnnnnnnnnnnnnnnnnnnnnnnnnnnnnnnnnnnnnnnnnnnnnnnnnnnnnnnnnnnnnnnnnnnnnnnnnnnnnnnnnnnnnnnnnnnnnnnnnnnnnnnnnnnnnnnnnnnnnnnnnnnnnnnnnnnnnnnnnnnnnnnnnnnnnnnnnnnnnnnnnnnnnnnnnnnnnnnnnnnnnnnnnnnnnnnnnnnnnnnnnnnnnnnnnnnnnnnnnnnnnnnnnnnnnnnnnnnnnnnnnnnnnnnnnnnnnnnnnnnnnnnnnnnnnnnnnnnnnnnnnnnnnnnnnnnnnnnnnnnnnnnnnnnnnnnnnnnnnnnnnnnnnnnnnnnnnnnnnnnnnnnnnnnnnnnnnnnnnnnnnnnnnnnnnnnnnnnnnnnnnnnnnnnnnnnnnnnnnnnnnnnnnnnnnnnnnnnnnnnnnnnnnnnnnnnnnnnnnnnnnnnnnnnnnnnnnnnnnnnnnnnnnnnnnnnnnnnnnnnnnnnnnnnnnnnnnnnnnnnnnnnnnnnnnnnnnnnnnnnnnnnnnnnnnnnnnnnnnnnnnnnnnnnnnnnnnnnnnnnnnnnnnnnnnnnnnnnnnnnnnnnnnnnnnnnnnnnnnnnnnnnnnnnnnnnnnnnnnnnnnnnnnnnnnnnnnnnnnnnnnnnnnnnnnnnnnnnnnnnnnnnnnnnnnnnnnnnnnnnnnnnnnnnnnnnnnnnnnnnnnnnnnnnnnnnnnnnnnnnnnnnnnnnnnnnnnnnnnnnnnnnnnnnnnnnnnnnnnnnnnnnnnnnnnnnnnnnnnnnnnnnnnnnnnnnnnnnnnnnnnnnnnnnnnnnnnnnnnnnnnnnnnnnnnnnnnnnnnnnnnnnnnnnnnnnnnnnnnnnnnnnnnnnnnnnnnnnnnnnnnnnnnnnnnnnnnnnnnnnnnnnnnnnnnnnnnnnnnnnnnnnnnnnnnnnnnnnnnnnnnnnnnnnnnnnnnnnnnnnnnnnnnnnnnnnnnnnnnnnnnnnnnnnnnnnnnnnnnnnnnnnnnnnnnnnnnnnnnnnnnnnnnnnnnnnnnnnnnnnnnnnnnnnnnnnnnnnnnnnnnnnnnnnnnnnnnnnnnnnnnnnnnnnnnnnnnnnnnnnnnnnnnnnnnnnnnnnnnnnnnnnnnnnnnnnnnnnnnnnnnnnnnnnnnnnnnnnnnnnnnnnnnnnnnnnnnnnnnnnnnnnnnnnnnnnnnnnnnnnnnnnnnnnnnnnnnnnnnnnnnnnnnnnnnnnnnnnnnnnnnnnnnnnnnnnnnnnnnnnnnnnnnnnnnnnnnnnnnnnnnnnnnnnnnnnnnnnnnnnnnnnnnnnnnnnnnnnnnnnnnnnnnnnnnnnnnnnnnnnnnnnnnnnnnnnnnnnnnnnnnnnnnnnnnnnnnnnnnnnnnnnnnnnnnnnnnnnnnnnnnnnnnnnnnnnnnnnnnnnnnnnnnnnnnnnnnnnnnnnnnnnnnnnnnnnnnnnnnnnnnnnnnnnnnnnnnnnnnnnnnnnnnnnnnnnnnnnnnnnnnnnnnnnnnnnnnnnnnnnnnnnnnnnnnnnnnnnnnnnnnnnnnnnnnnnnnnnnnnnnnnnnnnnnnnnnnnnnnnnnnnnnnnnnnnnnnnnnnnnnnnnnnnnnnnnnnnnnnnnnnnnnnnnnnnnnnnnnnnnnnnnnnnnnnnnnnnnnnnnnnnnnnnnnnnnnnnnnnnnnnnnnnnnnnnnnnnnnnnnnnnnnnnnnnnnnnnnnnnnnnnnnnnnnnnnnnnnnnnnnnnnnnnnnnnnnnnnnnnnnnnnnnnnnnnnnnnnnnnnnnnnnnnnnnnnnnnnnnnnnnnnnnnnnnnnnnnnnnnnnnnnnnnnnnnnnnnnnnnnnnnnnnnnnnnnnnnnnnnnnnnnnnnnnnnnnnnnnnnnnnnnnnnnnnnnnnnnnnnnnnnnnnnnnnnnnnnnnnnnnnnnnnnnnnnnnnnnnnnnnnnnnnnnnnnnnnnnnnnnnnnnnnnnnnnnnnnnnnnnnnnnnnnnnnnnnnnnnnnnnnnnnnnnnnnnnnnnnnnnnnnnnnnnnnnnnnnnnnnnnnnnnnnnnnnnnnnnnnnnnnnnnnnnnnnnnnnnnnnnnnnnnnnnnnnnnnnnnnnnnnnnnnnnnnnnnnnnnnnnnnnnnnnnnnnnnnnnnnnnnnnnnnnnnnnnnnnnnnnnnnnnnnnnnnnnnnnnnnnnnnnnnnnnnnnnnnnnnnnnnnnnnnnnnnnnnnnnnnnnnnnnnnnnnnnnnnnnnnnnnnnnnnnnnnnnnnnnnnnnnnnnnnnnnnnnnnnnnnnnnnnnnnnnnnnnnnnnnnnnnnnnnnnnnnnnnnnnnnnnnnnnnnnnnnnnnnnnnnnnnnnnnnnnnnnnnnnnnnnnnnnnnnnnnnnnnnnnnnnnnnnnnnnnnnnnnnnnnnnnnnnnnnnnnnnnnnnnnnnnnnnnnnnnnnnnnnnnnnnnnnnnnnnnnnnnnnnnnnnnnnnnnnnnnnnnnnnnnnnnnnnnnnnnnnnnnnnnnnnnnnnnnnnnnnnnnnnnnnnnnnnnnnnnnnnnnnnnnnnnnnnnnnnnnnnnnnnnnnnnnnnnnnnnnnnnnnnnnnnnnnnnnnnnnnnnnnnnnnnnnnnnnnnnnnnnnnnnnnnnnnnnnnnnnnnnnnnnnnnnnnnnnnnnnnnnnnnnnnnnnnnnnnnnnnnnnnnnnnnnnnnnnnnnnnnnnnnnnnnnnnnnnnnnnnnnnnnnnnnnnnnnnnnnnnnnnnnnnnnnnnnnnnnnnnnnnnnnnnnnnnnnnnnnnnnnnnnnnnnnnnnnnnnnnnnnnnnnnnnnnnnnnnnnnnnnnnnnnnnnnnnnnnnnnnnnnnnnnnnnnnnnnnnnnnnnnnnnnnnnnnnnnnnnnnnnnnnnnnnnnnnnnnnnnnnnnnnnnnnnnnnnnnnnnnnnnnnnnnnnnnnnnnnnnnnnnnnnnnnnnnnnnnnnnnnnnnnnnnnnnnnnnnnnnnnnnnnnnnnnnnnnnnnnnnnnnnnnnnnnnnnnnnnnnnnnnnnnnnnnnnnnnnnnnnnnnnnnnnnnnnnnnnnnnnnnnnnnnnnnnnnnnnnnnnnnnnnnnnnnnnnnnnnnnnnnnnnnnnnnnnnnnnnnnnnnnnnnnnnnnnnnnnnnnnnnnnnnnnnnnnnnnnnnnnnnnnnnnnnnnnnnnnnnnnnnnnnnnnnnnnnnnnnnnnnnnnnnnnnnnnnnnnnnnnnnnnnnnnnnnnnnnnnnnnnnnnnnnnnnnnnnnnnnnnnnnnnnnnnnnnnnnnnnnnnnnnnnnnnnnnnnnnnnnnnnnnnnnnnnnnnnnnnnnnnnnnnnnnnnnnnnnnnnnnnnnnnnnnnnnnnnnnnnnnnnnnnnnnnnnnnnnnnnnnnnnnnnnnnnnnnnnnnnnnnnnnnnnnnnnnnnnnnnnnnnnnnnnnnnnnnnnnnnnnnnnnnnnnnnnnnnnnnnnnnnnnnnnnnnnnnnnnnnnnnnnnnnnnnnnnnnnnnnnnnnnnnnnnnnnnnnnnnnnnnnnnnnnnnnnnnnnnnnnnnnnnnnnnnnnnnnnnnnnnnnnnnnnnnnnnnnnnnnnnnnnnnnnnnnnnnnnnnnnnnnnnnnnnnnnnnnnnnnnnnnnnnnnnnnnnnnnnnnnnnnnnnnnnnnnnnnnnnnnnnnnnnnnnnnnnnnnnnnnnnnnnnnnnnnnnnnnnnnnnnnnnnnnnnnnnnnnnnnnnnnnnnnnnnnnnnnnnnnnnnnnnnnnnnnnnnnnnnnnnnnnnnnnnnnnnnnnnnnnnnnnnnnnnnnnnnnnnnnnnnnnnnnnnnnnnnnnnnnnnnnnnnnnnnnnnnnnnnnnnnnnnnnnnnnnnnnnnnnnnnnnnnnnnnnnnnnnnnnnnnnnnnnnnnnnnnnnnnnnnnnnnnnnnnnnnnnnnnnnnnnnnnnnnnnnnnnnnnnnnnnnnnnnnnnnnnnnnnnnnnnnnnnnnnnnnnnnnnnnnnnnnnnnnnnnnnnnnnnnnnnnnnnnnnnnnnnnnnnnnnnnnnnnnnnnnnnnnnnnnnnnnnnnnnnnnnnnnnnnnnnnnnnnnnnnnnnnnnnnnnnnnnnnnnnnnnnnnnnnnnnnnnnnnnnnnnnnnnnnnnnnnnnnnnnnnnnnnnnnnnnnnnnnnnnnnnnnnnnnnnnnnnnnnnnnnnnnnnnnnnnnnnnnnnnnnnnnnnnnnnnnnnnnnnnnnnnnnnnnnnnnnnnnnnnnnnnnnnnnnnnnnnnnnnnnnnnnnnnnnnnnnnnnnnnnnnnnnnnnnnnnnnnnnnnnnnnnnnnnnnnnnnnnnnnnnnnnnnnnnnnnnnnnnnnnnnnnnnnnnnnnnnnnnnnnnnnnnnnnnnnnnnnnnnnnnnnnnnnnnnnnnnnnnnnnnnnnnnnnnnnnnnnnnnnnnnnnnnnnnnnnnnnnnnnnnnnnnnnnnnnnnnnnnnnnnnnnnnnnnnnnnnnnnnnnnnnnnnnnnnnnnnnnnnnnnnnnnnnnnnnnnnnnnnnnnnnnnnnnnnnnnnnnnnnnnnnnnnnnnnnnnnnnnnnnnnnnnnnnnnnnnnnnnnnnnnnnnnnnnnnnnnnnnnnnnnnnnnnnnnnnnnnnnnnnnnnnnnnnnnnnnnnnnnnnnnnnnnnnnnnnnnnnnnnnnnnnnnnnnnnnnnnnnnnnnnnnnnnnnnnnnnnnnnnnnnnnnnnnnnnnnnnnnnnnnnnnnnnnnnnnnnnnnnnnnnnnnnnnnnnnnnnnnnnnnnnnnnnnnnnnnnnnnnnnnnnnnnnnnnnnnnnnnnnnnnnnnnnnnnnnnnnnnnnnnnnnnnnnnnnnnnnnnnnnnnnnnnnnnnnnnnnnnnnnnnnnnnnnnnnnnnnnnnnnnnnnnnnnnnnnnnnnnnnnnnnnnnnnnnnnnnnnnnnnnnnnnnnnnnnnnnnnnnnnnnnnnnnnnnnnnnnnnnnnnnnnnnnnnnnnnnnnnnnnnnnnnnnnnnnnnnnnnnnnnnnnnnnnnnnnnnnnnnnnnnnnnnnnnnnnnnnnnnnnnnnnnnnnnnnnnnnnnnnnnnnnnnnnnnnnnnnnnnnnnnnnnnnnnnnnnnnnnnnnnnnnnnnnnnnnnnnnnnnnnnnnnnnnnnnnnnnnnnnnnnnnnnnnnnnnnnnnnnnnnnnnnnnnnnnnnnnnnnnnnnnnnnnnnnnnnnnnnnnnnnnnnnnnnnnnnnnnnnnnnnnnnnnnnnnnnnnnnnnnnnnnnnnnnnnnnnnnnnnnnnnnnnnnnnnnnnnnnnnnnnnnnnnnnnnnnnnnnnnnnnnnnnnnnnnnnnnnnnnnnnnnnnnnnnnnnnnnnnnnnnnnnnnnnnnnnnnnnnnnnnnnnnnnnnnnnnnnnnnnnnnnnnnnnnnnnnnnnnnnnnnnnnnnnnnnnnnnnnnnnnnnnnnnnnnnnnnnnnnnnnnnnnnnnnnnnnnnnnnnnnnnnnnnnnnnnnnnnnnnnnnnnnnnnnnnnnnnnnnnnnnnnnnnnnnnnnnnnnnnnnnnnnnnnnnnnnnnnnnnnnnnnnnnnnnnnnnnnnnnnnnnnnnnnnnnnnnnnnnnnnnnnnnnnnnnnnnnnnnnnnnnnnnnnnnnnnnnnnnnnnnnnnnnnnnnnnnnnnnnnnnnnnnnnnnnnnnnnnnnnnnnnnnnnnnnnnnnnnnnnnnnnnnnnnnnnnnnnnnnnnnnnnnnnnnnnnnnnnnnnnnnnnnnnnnnnnnnnnnnnnnnnnnnnnnnnnnnnnnnnnnnnnnnnnnnnnnnnnnnnnnnnnnnnnnnnnnnnnnnnnnnnnnnnnnnnnnnnnnnnnnnnnnnnnnnnnnnnnnnnnnnnnnnnnnnnnnnnnnnnnnnnnnnnnnnnnnnnnnnnnnnnnnnnnnnnnnnnnnnnnnnnnnnnnnnnnnnnnnnnnnnnnnnnnnnnnnnnnnnnnnnnnnnnnnnnnnnnnnnnnnnnnnnnnnnnnnnnnnnnnnnnnnnnnnnnnnnnnnnnnnnnnnnnnnnnnnnnnnnnnnnnnnnnnnnnnnnnnnnnnnnnnnnnnnnnnnnnnnnnnnnnnnnnnnnnnnnnnnnnnnnnnnnnnnnnnnnnnnnnnnnnnnnnnnnnnnnnnnnnnnnnnnnnnnnnnnnnnnnnnnnnnnnnnnnnnnnnnnnnnnnnnnnnnnnnnnnnnnnnnnnnnnnnnnnnnnnnnnnnnnnnnnnnnnnnnnnnnnnnnnnnnnnnnnnnnnnnnnnnnnnnnnnnnnnnnnnnnnnnnnnnnnnnnnnnnnnnnnnnnnnnnnnnnnnnnnnnnnnnnnnnnnnnnnnnnnnnnnnnnnnnnnnnnnnnnnnnnnnnnnnnnnnnnnnnnnnnnnnnnnnnnnnnnnnnnnnnnnnnnnnnnnnnnnnnnnnnnnnnnnnnnnnnnnnnnnnnnnnnnnnnnnnnnnnnnnnnnnnnnnnnnnnnnnnnnnnnnnnnnnnnnnnnnnnnnnnnnnnnnnnnnnnnnnnnnnnnnnnnnnnnnnnnnnnnnnnnnnnnnnnnnnnnnnnnnnnnnnnnnnnnnnnnnnnnnnnnnnnnnnnnnnnnnnnnnnnnnnnnnnnnnnnnnnnnnnnnnnnnnnnnnnnnnnnnnnnnnnnnnnnnnnnnnnnnnnnnnnnnnnnnnnnnnnnnnnnnnnnnnnnnnnnnnnnnnnnnnnnnnnnnnnnnnnnnnnnnnnnnnnnnnnnnnnnnnnnnnnnnnnnnnnnnnnnnnnnnnnnnnnnnnnnnnnnnnnnnnnnnnnnnnnnnnnnnnnnnnnnnnnnnnnnnnnnnnnnnnnnnnnnnnnnnnnnnnnnnnnnnnnnnnnnnnnnnnnnnnnnnnnnnnnnnnnnnnnnnnnnnnnnnnnnnnnnnnnnnnnnnnnnnnnnnnnnnnnnnnnnnnnnnnnnnnnnnnnnnnnnnnnnnnnnnnnnnnnnnnnnnnnnnnnnnnnnnnnnnnnnnnnnnnnnnnnnnnnnnnnnnnnnnnnnnnnnnnnnnnnnnnnnnnnnnnnnnnnnnnnnnnnnnnnnnnnnnnnnnnnnnnnnnnnnnnnnnnnnnnnnnnnnnnnnnnnnnnnnnnnnnnnnnnnnnnnnnnnnnnnnnnnnnnnnnnnnnnnnnnnnnnnnnnnnnnnnnnnnnnnnnnnnnnnnnnnnnnnnnnnnnnnnnnnnnnnnnnnnnnnnnnnnnnnnnnnnnnnnnnnnnnnnnnnnnnnnnnnnnnnnnnnnnnnnnnnnnnnnnnnnnnnnnnnnnnnnnnnnnnnnnnnnnnnnnnnnnnnnnnnnnnnnnnnnnnnnnnnnnnnnnnnnnnnnnnnnnnnnnnnnnnnnnnnnnnnnnnnnnnnnnnnnnnnnnnnnnnnnnnnnnnnnnnnnnnnnnnnnnnnnnnnnnnnnnnnnnnnnnnnnnnnnnnnnnnnnnnnnnnnnnnnnnnnnnnnnnnnnnnnnnnnnnnnnnnnnnnnnnnnnnnnnnnnnnnnnnnnnnnnnnnnnnnnnnnnnnnnnnnnnnnnnnnnnnnnnnnnnnnnnnnnnnnnnnnnnnnnnnnnnnnnnnnnnnnnnnnnnnnnnnnnnnnnnnnnnnnnnnnnnnnnnnnnnnnnnnnnnnnnnnnnnnnnnnnnnnnnnnnnnnnnnnnnnnnnnnnnnnnnnnnnnnnnnnnnnnnnnnnnnnnnnnnnnnnnnnnnnnnnnnnnnnnnnnnnnnnnnnnnnnnnnnnnnnnnnnnnnnnnnnnnnnnnnnnnnnnnnnnnnnnnnnnnnnnnnnnnnnnnnnnnnnnnnnnnnnnnnnnnnnnnnnnnnnnnnnnnnnnnnnnnnnnnnnnnnnnnnnnnnnnnnnnnnnnnnnnnnnnnnnnnnnnnnnnnnnnnnnnnnnnnnnnnnnnnnnnnnnnnnnnnnnnnnnnnnnnnnnnnnnnnnnnnnnnnnnnnnnnnnnnnnnnnnnnnnnnnnnnnnnnnnnnnnnnnnnnnnnnnnnnnnnnnnnnnnnnnnnnnnnnnnnnnnnnnnnnnnnnnnnnnnnnnnnnnnnnnnnnnnnnnnnnnnnnnnnnnnnnnnnnnnnnnnnnnnnnnnnnnnnnnnnnnnnnnnnnnnnnnnnnnnnnnnnnnnnnnnnnnnnnnnnnnnnnnnnnnnnnnnnnnnnnnnnnnnnnnnnnnnnnnnnnnnnnnnnnnnnnnnnnnnnnnnnnnnnnnnnnnnnnnnnnnnnnnnnnnnnnnnnnnnnnnnnnnnnnnnnnnnnnnnnnnnnnnnnnnnnnnnnnnnnnnnnnnnnnnnnnnnnnnnnnnnnnnnnnnnnnnnnnnnnnnnnnnnnnnnnnnnnnnnnnnnnnnnnnnnnnnnnnnnnnnnnnnnnnnnnnnnnnnnnnnnnnnnnnnnnnnnnnnnnnnnnnnnnnnnnnnnnnnnnnnnnnnnnnnnnnnnnnnnnnnnnnnnnnnnnnnnnnnnnnnnnnnnnnnnnnnnnnnnnnnnnnnnnnnnnnnnnnnnnnnnnnnnnnnnnnnnnnnnnnnnnnnnnnnnnnnnnnnnnnnnnnnnnnnnnnnnnnnnnnnnnnnnnnnnnnnnnnnnnnnnnnnnnnnnnnnnnnnnnnnnnnnnnnnnnnnnnnnnnnnnnnnnnnnnnnnnnnnnnnnnnnnnnnnnnnnnnnnnnnnnnnnnnnnnnnnnnnnnnnnnnnnnnnnnnnnnnnnnnnnnnnnnnnnnnnnnnnnnnnnnnnnnnnnnnnnnnnnnnnnnnnnnnnnnnnnnnnnnnnnnnnnnnnnnnnnnnnnnnnnnnnnnnnnnnnnnnnnnnnnnnnnnnnnnnnnnnnnnnnnnnnnnnnnnnnnnnnnnnnnnnnnnnnnnnnnnnnnnnnnnnnnnnnnnnnnnnnnnnnnnnnnnnnnnnnnnnnnnnnnnnnnnnnnnnnnnnnnnnnnnnnnnnnnnnnnnnnnnnnnnnnnnnnnnnnnnnnnnnnnnnnnnnnnnnnnnnnnnnnnnnnnnnnnnnnnnnnnnnnnnnnnnnnnnnnnnnnnnnnnnnnnnnnnnnnnnnnnnnnnnnnnnnnnnnnnnnnnnnnnnnnnnnnnnnnnnnnnnnnnnnnnnnnnnnnnnnnnnnnnnnnnnnnnnnnnnnnnnnnnnnnnnnnnnnnnnnnnnnnnnnnnnnnnnnnnnnnnnnnnnnnnnnnnnnnnnnnnnnnnnnnnnnnnnnnnnnnnnnnnnnnnnnnnnnnnnnnnnnnnnnnnnnnnnnnnnnnnnnnnnnnnnnnnnnnnnnnnnnnnnnnnnnnnnnnnnnnnnnnnnnnnnnnnnnnnnnnnnnnnnnnnnnnnnnnnnnnnnnnnnnnnnnnnnnnnnnnnnnnnnnnnnnnnnnnnnnnnnnnnnnnnnnnnnnnnnnnnnnnnnnnnnnnnnnnnnnnnnnnnnnnnnnnnnnnnnnnnnnnnnnnnnnnnnnnnnnnnnnnnnnnnnnnnnnnnnnnnnnnnnnnnnnnnnnnnnnnnnnnnnnnnnnnnnnnnnnnnnnnnnnnnnnnnnnnnnnnnnnnnnnnnnnnnnnnnnnnnnnnnnnnnnnnnnnnnnnnnnnnnnnnnnnnnnnnnnnnnnnnnnnnnnnnnnnnnnnnnnnnnnnnnnnnnnnnnnnnnnnnnnnnnnnnnnnnnnnnnnnnnnnnnnnnnnnnnnnnnnnnnnnnnnnnnnnnnnnnnnnnnnnnnnnnnnnnnnnnnnnnnnnnnnnnnnnnnnnnnnnnnnnnnnnnnnnnnnnnnnnnnnnnnnnnnnnnnnnnnnnnnnnnnnnnnnnnnnnnnnnnnnnnnnnnnnnnnnnnnnnnnnnnnnnnnnnnnnnnnnnnnnnnnnnnnnnnnnnnnnnnnnnnnnnnnnnnnnnnnnnnnnnnnnnnnnnnnnnnnnnnnnnnnnnnnnnnnnnnnnnnnnnnnnnnnnnnnnnnnnnnnnnnnnnnnnnnnnnnnnnnnnnnnnnnnnnnnnnnnnnnnnnnnnnnnnnnnnnnnnnnnnnnnnnnnnnnnnnnnnnnnnnnnnnnnnnnnnnnnnnnnnnnnnnnnnnnnnnnnnnnnnnnnnnnnnnnnnnnnnnnnnnnnnnnnnnnnnnnnnnnnnnnnnnnnnnnnnnnnnnnnnnnnnnnnnnnnnnnnnnnnnnnnnnnnnnnnnnnnnnnnnnnnnnnnnnnnnnnnnnnnnnnnnnnnnnnnnnnnnnnnnnnnnnnnnnnnnnnnnnnnnnnnnnnnnnnnnnnnnnnnnnnnnnnnnnnnnnnnnnnnnnnnnnnnnnnnnnnnnnnnnnnnnnnnnnnnnnnnnnnnnnnnnnnnnnnnnnnnnnnnnnnnnnnnnnnnnnnnnnnnnnnnnnnnnnnnnnnnnnnnnnnnnnnnnnnnnnnnnnnnnnnnnnnnnnnnnnnnnnnnnnnnnnnnnnnnnnnnnnnnnnnnnnnnnnnnnnnnnnnnnnnnnnnnnnnnnnnnnnnnnnnnnnnnnnnnnnnnnnnnnnnnnnnnnnnnnnnnnnnnnnnnnnnnnnnnnnnnnnnnnnnnnnnnnnnnnnnnnnnnnnnnnnnnnnnnnnnnnnnnnnnnnnnnnnnnnnnnnnnnnnnnnnnnnnnnnnnnnnnnnnnnnnnnnnnnnnnnnnnnnnnnnnnnnnnnnnnnnnnnnnnnnnnnnnnnnnnnnnnnnnnnnnnnnnnnnnnnnnnnnnnnnnnnnnnnnnnnnnnnnnnnnnnnnnnnnnnnnnnnnnnnnnnnnnnnnnnnnnnnnnnnnnnnnnnnnnnnnnnnnnnnnnnnnnnnnnnnnnnnnnnnnnnnnnnnnnnnnnnnnnnnnnnnnnnnnnnnnnnnnnnnnnnnnnnnnnnnnnnnnnnnnnnnnnnnnnnnnnnnnnnnnnnnnnnnnnnnnnnnnnnnnnnnnnnnnnnnnnnnnnnnnnnnnnnnnnnnnnnnnnnnnnnnnnnnnnnnnnnnnnnnnnnnnnnnnnnnnnnnnnnnnnnnnnnnnnnnnnnnnnnnnnnnnnnnnnnnnnnnnnnnnnnnnnnnnnnnnnnnnnnnnnnnnnnnnnnnnnnnnnnnnnnnnnnnnnnnnnnnnnnnnnnnnnnnnnnnnnnnnnnnnnnnnnnnnnnnnnnnnnnnnnnnnnnnnnnnnnnnnnnnnnnnnnnnnnnnnnnnnnnnnnnnnnnnnnnnnnnnnnnnnnnnnnnnnnnnnnnnnnnnnnnnnnnnnnnnnnnnnnnnnnnnnnnnnnnnnnnnnnnnnnnnnnnnnnnnnnnnnnnnnnnnnnnnnnnnnnnnnnnnnnnnnnnnnnnnnnnnnnnnnnnnnnnnnnnnnnnnnnnnnnnnnnnnnnnnnnnnnnnnnnnnnnnnnnnnnnnnnnnnnnnnnnnnnnnnnnnnnnnnnnnnnnnnnnnnnnnnnnnnnnnnnnnnnnnnnnnnnnnnnnnnnnnnnnnnnnnnnnnnnnnnnnnnnnnnnnnnnnnnnnnnnnnnnnnnnnnnnnnnnnnnnnnnnnnnnnnnnnnnnnnnnnnnnnnnnnnnnnnnnnnnnnnnnnnnnnnnnnnnnnnnnnnnnnnnnnnnnnnnnnnnnnnnnnnnnnnnnnnnnnnnnnnnnnnnnnnnnnnnnnnnnnnnnnnnnnnnnnnnnnnnnnnnnnnnnnnnnnnnnnnnnnnnnnnnnnnnnnnnnnnnnnnnnnnnnnnnnnnnnnnnnnnnnnnnnnnnnnnnnnnnnnnnnnnnnnnnnnnnnnnnnnnnnnnnnnnnnnnnnnnnnnnnnnnnnnnnnnnnnnnnnnnnnnnnnnnnnnnnnnnnnnnnnnnnnnnnnnnnnnnnnnnnnnnnnnnnnnnnnnnnnnnnnnnnnnnnnnnnnnnnnnnnnnnnnnnnnnnnnnnnnnnnnnnnnnnnnnnnnnnnnnnnnnnnnnnnnnnnnnnnnnnnnnnnnnnnnnnnnnnnnnnnnnnnnnnnnnnnnnnnnnnnnnnnnnnnnnnnnnnnnnnnnnnnnnnnnnnnnnnnnnnnnnnnnnnnnnnnnnnnnnnnnnnnnnnnnnnnnnnnnnnnnnnnnnnnnnnnnnnnnnnnnnnnnnnnnnnnnnnnnnnnnnnnnnnnnnnnnnnnnnnnnnnnnnnnnnnnnnnnnnnnnnnnnnnnnnnnnnnnnnnnnnnnnnnnnnnnnnnnnnnnnnnnnnnnnnnnnnnnnnnnnnnnnnnnnnnnnnnnnnnnnnnnnnnnnnnnnnnnnnnnnnnnnnnnnnnnnnnnnnnnnnnnnnnnnnnnnnnnnnnnnnnnnnnnnnnnnnnnnnnnnnnnnnnnnnnnnnnnnnnnnnnnnnnnnnnnnnnnnnnnnnnnnnnnnnnnnnnnnnnnnnnnnnnnnnnnnnnnnnnnnnnnnnnnnnnnnnnnnnnnnnnnnnnnnnnnnnnnnnnnnnnnnnnnnnnnnnnnnnnnnnnnnnnnnnnnnnnnnnnnnnnnnnnnnnnnnnnnnnnnnnnnnnnnnnnnnnnnnnnnnnnnnnnnnnnnnnnnnnnnnnnnnnnnnnnnnnnnnnnnnnnnnnnnnnnnnnnnnnnnnnnnnnnnnnnnnnnnnnnnnnnnnnnnnnnnnnnnnnnnnnnnnnnnnnnnnnnnnnnnnnnnnnnnnnnnnnnnnnnnnnnnnnnnnnnnnnnnnnnnnnnnnnnnnnnnnnnnnnnnnnnnnnnnnnnnnnnnnnnnnnnnnnnnnnnnnnnnnnnnnnnnnnnnnnnnnnnnnnnnnnnnnnnnnnnnnnnnnnnnnnnnnnnnnnnnnnnnnnnnnnnnnnnnnnnnnnnnnnnnnnnnnnnnnnnnnnnnnnnnnnnnnnnnnnnnnnnnnnnnnnnnnnnnnnnnnnnnnnnnnnnnnnnnnnnnnnnnnnnnnnnnnnnnnnnnnnnnnnnnnnnnnnnnnnnnnnnnnnnnnnnnnnnnnnnnnnnnnnnnnnnnnnnnnnnnnnnnnnnnnnnnnnnnnnnnnnnnnnnnnnnnnnnnnnnnnnnnnnnnnnnnnnnnnnnnnnnnnnnnnnnnnnnnnnnnnnnnnnnnnnnnnnnnnnnnnnnnnnnnnnnnnnnnnnnnnnnnnnnnnnnnnnnnnnnnnnnnnnnnnnnnnnnnnnnnnnnnnnnnnnnnnnnnnnnnnnnnnnnnnnnnnnnnnnnnnnnnnnnnnnnnnnnnnnnnnnnnnnnnnnnnnnnnnnnnnnnnnnnnnnnnnnnnnnnnnnnnnnnnnnnnnnnnnnnnnnnnnnnnnnnnnnnnnnnnnnnnnnnnnnnnnnnnnnnnnnnnnnnnnnnnnnnnnnnnnnnnnnnnnnnnnnnnnnnnnnnnnnnnnnnnnnnnnnnnnnnnnnnnnnnnnnnnnnnnnnnnnnnnnnnnnnnnnnnnnnnnnnnnnnnnnnnnnnnnnnnnnnnnnnnnnnnnnnnnnnnnnnnnnnnnnnnnnnnnnnnnnnnnnnnnnnnnnnnnnnnnnnnnnnnnnnnnnnnnnnnnnnnnnnnnnnnnnnnnnnnnnnnnnnnnnnnnnnnnnnnnnnnnnnnnnnnnnnnnnnnnnnnnnnnnnnnnnnnnnnnnnnnnnnnnnnnnnnnnnnnnnnnnnnnnnnnnnnnnnnnnnnnnnnnnnnnnnnnnnnnnnnnnnnnnnnnnnnnnnnnnnnnnnnnnnnnnnnnnnnnnnnnnnnnnnnnnnnnnnnnnnnnnnnnnnnnnnnnnnnnnnnnnnnnnnnnnnnnnnnnnnnnnnnnnnnnnnnnnnnnnnnnnnnnnnnnnnnnnnnnnnnnnnnnnnnnnnnnnnnnnnnnnnnnnnnnnnnnnnnnnnnnnnnnnnnnnnnnnnnnnnnnnnnnnnnnnnnnnnnnnnnnnnnnnnnnnnnnnnnnnnnnnnnnnnnnnnnnnnnnnnnnnnnnnnnnnnnnnnnnnnnnnnnnnnnnnnnnnnnnnnnnnnnnnnnnnnnnnnnnnnnnnnnnnnnnnnnnnnnnnnnnnnnnnnnnnnnnnnnnnnnnnnnnnnnnnnnnnnnnnnnnnnnnnnnnnnnnnnnnnnnnnnnnnnnnnnnnnnnnnnnnnnnnnnnnnnnnnnnnnnnnnnnnnnnnnnnnnnnnnnnnnnnnnnnnnnnnnnnnnnnnnnnnnnnnnnnnnnnnnnnnnnnnnnnnnnnnnnnnnnnnnnnnnnnnnnnnnnnnnnnnnnnnnnnnnnnnnnnnnnnnnnnnnnnnnnnnnnnnnnnnnnnnnnnnnnnnnnnnnnnnnnnnnnnnnnnnnnnnnnnnnnnnnnnnnnnnnnnnnnnnnnnnnnnnnnnnnnnnnnnnnnnnnnnnnnnnnnnnnnnnnnnnnnnnnnnnnnnnnnnnnnnnnnnnnnnnnnnnnnnnnnnnnnnnnnnnnnnnnnnnnnnnnnnnnnnnnnnnnnnnnnnnnnnnnnnnnnnnnnnnnnnnnnnnnnnnnnnnnnnnnnnnnnnnnnnnnnnnnnnnnnnnnnnnnnnnnnnnnnnnnnnnnnnnnnnnnnnnnnnnnnnnnnnnnnnnnnnnnnnnnnnnnnnnnnnnnnnnnnnnnnnnnnnnnnnnnnnnnnnnnnnnnnnnnnnnnnnnnnnnnnnnnnnnnnnnnnnnnnnnnnnnnnnnnnnnnnnnnnnnnnnnnnnnnnnnnnnnnnnnnnnnnnnnnnnnnnnnnnnnnnnnnnnnnnnnnnnnnnnnnnnnnnnnnnnnnnnnnnnnnnnnnnnnnnnnnnnnnnnnnnnnnnnnnnnnnnnnnnnnnnnnnnnnnnnnnnnnnnnnnnnnnnnnnnnnnnnnnnnnnnnnnnnnnnnnnnnnnnnnnnnnnnnnnnnnnnnnnnnnnnnnnnnnnnnnnnnnnnnnnnnnnnnnnnnnnnnnnnnnnnnnnnnnnnnnnnnnnnnnnnnnnnnnnnnnnnnnnnnnnnnnnnnnnnnnnnnnnnnnnnnnnnnnnnnnnnnnnnnnnnnnnnnnnnnnnnnnnnnnnnnnnnnnnnnnnnnnnnnnnnnnnnnnnnnnnnnnnnnnnnnnnnnnnnnnnnnnnnnnnnnnnnnnnnnnnnnnnnnnnnnnnnnnnnnnnnnnnnnnnnnnnnnnnnnnnnnnnnnnnnnnnnnnnnnnnnnnnnnnnnnnnnnnnnnnnnnnnnnnnnnnnnnnnnnnnnnnnnnnnnnnnnnnnnnnnnnnnnnnnnnnnnnnnnnnnnnnnnnnnnnnnnnnnnnnnnnnnnnnnnnnnnnnnnnnnnnnnnnnnnnnnnnnnnnnnnnnnnnnnnnnnnnnnnnnnnnnnnnnnnnnnnnnnnnnnnnnnnnnnnnnnnnnnnnnnnnnnnnnnnnnnnnnnnnnnnnnnnnnnnnnnnnnnnnnnnnnnnnnnnnnnnnnnnnnnnnnnnnnnnnnnnnnnnnnnnnnnnnnnnnnnnnnnnnnnnnnnnnnnnnnnnnnnnnnnnnnnnnnnnnnnnnnnnnnnnnnnnnnnnnnnnnnnnnnnnnnnnnnnnnnnnnnnnnnnnnnnnnnnnnnnnnnnnnnnnnnnnnnnnnnnnnnnnnnnnnnnnnnnnnnnnnnnnnnnnnnnnnnnnnnnnnnnnnnnnnnnnnnnnnnnnnnnnnnnnnnnnnnnnnnnnnnnnnnnnnnnnnnnnnnnnnnnnnnnnnnnnnnnnnnnnnnnnnnnnnnnnnnnnnnnnnnnnnnnnnnnnnnnnnnnnnnnnnnnnnnnnnnnnnnnnnnnnnnnnnnnnnnnnnnnnnnnnnnnnnnnnnnnnnnnnnnnnnnnnnnnnnnnnnnnnnnnnnnnnnnnnnnnnnnnnnnnnnnnnnnnnnnnnnnnnnnnnnnnnnnnnnnnnnnnnnnnnnnnnnnnnnnnnnnnnnnnnnnnnnnnnnnnnnnnnnnnnnnnnnnnnnnnnnnnnnnnnnnnnnnnnnnnnnnnnnnnnnnnnnnnnnnnnnnnnnnnnnnnnnnnnnnnnnnnnnnnnnnnnnnnnnnnnnnnnnnnnnnnnnnnnnnnnnnnnnnnnnnnnnnnnnnnnnnnnnnnnnnnnnnnnnnnnnnnnnnnnnnnnnnnnnnnnnnnnnnnnnnnnnnnnnnnnnnnnnnnnnnnnnnnnnnnnnnnnnnnnnnnnnnnnnnnnnnnnnnnnnnnnnnnnnnnnnnnnnnnnnnnnnnnnnnnnnnnnnnnnnnnnnnnnnnnnnnnnnnnnnnnnnnnnnnnnnnnnnnnnnnnnnnnnnnnnnnnnnnnnnnnnnnnnnnnnnnnnnnnnnnnnnnnnnnnnnnnnnnnnnnnnnnnnnnnnnnnnnnnnnnnnnnnnnnnnnnnnnnnnnnnnnnnnnnnnnnnnnnnnnnnnnnnnnnnnnnnnnnnnnnnnnnnnnnnnnnnnnnnnnnnnnnnnnnnnnnnnnnnnnnnnnnnnnnnnnnnnnnnnnnnnnnnnnnnnnnnnnnnnnnnnnnnnnnnnnnnnnnnnnnnnnnnnnnnnnnnnnnnnnnnnnnnnnnnnnnnnnnnnnnnnnnnnnnnnnnnnnnnnnnnnnnnnnnnnnnnnnnnnnnnnnnnnnnnnnnnnnnnnnnnnnnnnnnnnnnnnnnnnnnnnnnnnnnnnnnnnnnnnnnnnnnnnnnnnnnnnnnnnnnnnnnnnnnnnnnnnnnnnnnnnnnnnnnnnnnnnnnnnnnnnnnnnnnnnnnnnnnnnnnnnnnnnnnnnnnnnnnnnnnnnnnnnnnnnnnnnnnnnnnnnnnnnnnnnnnnnnnnnnnnnnnnnnnnnnnnnnnnnnnnnnnnnnnnnnnnnnnnnnnnnnnnnnnnnnnnnnnnnnnnnnnnnnnnnnnnnnnnnnnnnnnnnnnnnnnnnnnnnnnnnnnnnnnnnnnnnnnnnnnnnnnnnnnnnnnnnnnnnnnnnnnnnnnnnnnnnnnnnnnnnnnnnnnnnnnnnnnnnnnnnnnnnnnnnnnnnnnnnnnnnnnnnnnnnnnnnnnnnnnnnnnnnnnnnnnnnnnnnnnnnnnnnnnnnnnnnnnnnnnnnnnnnnnnnnnnnnnnnnnnnnnnnnnnnnnnnnnnnnnnnnnnnnnnnnnnnnnnnnnnnnnnnnnnnnnnnnnnnnnnnnnnnnnnnnnnnnnnnnnnnnnnnnnnnnnnnnnnnnnnnnnnnnnnnnnnnnnnnnnnnnnnnnnnnnnnnnnnnnnnnnnnnnnnnnnnnnnnnnnnnnnnnnnnnnnnnnnnnnnnnnnnnnnnnnnnnnnnnnnnnnnnnnnnnnnnnnnnnnnnnnnnnnnnnnnnnnnnnnnnnnnnnnnnnnnnnnnnnnnnnnnnnnnnnnnnnnnnnnnnnnnnnnnnnnnnnnnnnnnnnnnnnnnnnnnnnnnnnnnnnnnnnnnnnnnnnnnnnnnnnnnnnnnnnnnnnnnnnnnnnnnnnnnnnnnnnnnnnnnnnnnnnnnnnnnnnnnnnnnnnnnnnnnnnnnnnnnnnnnnnnnnnnnnnnnnnnnnnnnnnnnnnnnnnnnnnnnnnnnnnnnnnnnnnnnnnnnnnnnnnnnnnnnnnnnnnnnnnnnnnnnnnnnnnnnnnnnnnnnnnnnnnnnnnnnnnnnnnnnnnnnnnnnnnnnnnnnnnnnnnnnnnnnnnnnnnnnnnnnnnnnnnnnnnnnnnnnnnnnnnnnnnnnnnnnnnnnnnnnnnnnnnnnnnnnnnnnnnnnnnnnnnnnnnnnnnnnnnnnnnnnnnnnnnnnnnnnnnnnnnnnnnnnnnnnnnnnnnnnnnnnnnnnnnnnnnnnnnnnnnnnnnnnnnnnnnnnnnnnnnnnnnnnnnnnnnnnnnnnnnnnnnnnnnnnnnnnnnnnnnnnnnnnnnnnnnnnnnnnnnnnnnnnnnnnnnnnnnnnnnnnnnnnnnnnnnnnnnnnnnnnnnnnnnnnnnnnnnnnnnnnnnnnnnnnnnnnnnnnnnnnnnnnnnnnnnnnnnnnnnnnnnnnnnnnnnnnnnnnnnnnnnnnnnnnnnnnnnnnnnnnnnnnnnnnnnnnnnnnnnnnnnnnnnnnnnnnnnnnnnnnnnnnnnnnnnnnnnnnnnnnnnnnnnnnnnnnnnnnnnnnnnnnnnnnnnnnnnnnnnnnnnnnnnnnnnnnnnnnnnnnnnnnnnnnnnnnnnnnnnnnnnnnnnnnnnnnnnnnnnnnnnnnnnnnnnnnnnnnnnnnnnnnnnnnnnnnnnnnnnnnnnnnnnnnnnnnnnnnnnnnnnnnnnnnnnnnnnnnnnnnnnnnnnnnnnnnnnnnnnnnnnnnnnnnnnnnnnnnnnnnnnnnnnnnnnnnnnnnnnnnnnnnnnnnnnnnnnnnnnnnnnnnnnnnnnnnnnnnnnnnnnnnnnnnnnnnnnnnnnnnnnnnnnnnnnnnnnnnnnnnnnnnnnnnnnnnnnnnnnnnnnnnnnnnnnnnnnnnnnnnnnnnnnnnnnnnnnnnnnnnnnnnnnnnnnnnnnnnnnnnnnnnnnnnnnnnnnnnnnnnnnnnnnnnnnnnnnnnnnnnnnnnnnnnnnnnnnnnnnnnnnnnnnnnnnnnnnnnnnnnnnnnnnnnnnnnnnnnnnnnnnnnnnnnnnnnnnnnnnnnnnnnnnnnnnnnnnnnnnnnnnnnnnnnnnnnnnnnnnnnnnnnnnnnnnnnnnnnnnnnnnnnnnnnnnnnnnnnnnnnnnnnnnnnnnnnnnnnnnnnnnnnnnnnnnnnnnnnnnnnnnnnnnnnnnnnnnnnnnnnnnnnnnnnnnnnnnnnnnnnnnnnnnnnnnnnnnnnnnnnnnnnnnnnnnnnnnnnnnnnnnnnnnnnnnnnnnnnnnnnnnnnnnnnnnnnnnnnnnnnnnnnnnnnnnnnnnnnnnnnnnnnnnnnnnnnnnnnnnnnnnnnnnnnnnnnnnnnnnnnnnnnnnnnnnnnnnnnnnnnnnnnnnnnnnnnnnnnnnnnnnnnnnnnnnnnnnnnnnnnnnnnnnnnnnnnnnnnnnnnnnnnnnnnnnnnnnnnnnnnnnnnnnnnnnnnnnnnnnnnnnnnnnnnnnnnnnnnnnnnnnnnnnnnnnnnnnnnnnnnnnnnnnnnnnnnnnnnnnnnnnnnnnnnnnnnnnnnnnnnnnnnnnnnnnnnnnnnnnnnnnnnnnnnnnnnnnnnnnnnnnnnnnnnnnnnnnnnnnnnnnnnnnnnnnnnnnnnnnnnnnnnnnnnnnnnnnnnnnnnnnnnnnnnnnnnnnnnnnnnnnnnnnnnnnnnnnnnnnnnnnnnnnnnnnnnnnnnnnnnnnnnnnnnnnnnnnnnnnnnnnnnnnnnnnnnnnnnnnnnnnnnnnnnnnnnnnnnnnnnnnnnnnnnnnnnnnnnnnnnnnnnnnnnnnnnnnnnnnnnnnnnnnnnnnnnnnnnnnnnnnnnnnnnnnnnnnnnnnnnnnnnnnnnnnnnnnnnnnnnnnnnnnnnnnnnnnnnnnnnnnnnnnnnnnnnnnnnnnnnnnnnnnnnnnnnnnnnnnnnnnnnnnnnnnnnnnnnnnnnnnnnnnnnnnnnnnnnnnnnnnnnnnnnnnnnnnnnnnnnnnnnnnnnnnnnnnnnnnnnnnnnnnnnnnnnnnnnnnnnnnnnnnnnnnnnnnnnnnnnnnnnnnnnnnnnnnnnnnnnnnnnnnnnnnnnnnnnnnnnnnnnnnnnnnnnnnnnnnnnnnnnnnnnnnnnnnnnnnnnnnnnnnnnnnnnnnnnnnnnnnnnnnnnnnnnnnnnnnnnnnnnnnnnnnnnnnnnnnnnnnnnnnnnnnnnnnnnnnnnnnnnnnnnnnnnnnnnnnnnnnnnnnnnnnnnnnnnnnnnnnnnnnnnnnnnnnnnnnnnnnnnnnnnnnnnnnnnnnnnnnnnnnnnnnnnnnnnnnnnnnnnnnnnnnnnnnnnnnnnnnnnnnnnnnnnnnnnnnnnnnnnnnnnnnnnnnnnnnnnnnnnnnnnnnnnnnnnnnnnnnnnnnnnnnnnnnnnnnnnnnnnnnnnnnnnnnnnnnnnnnnnnnnnnnnnnnnnnnnnnnnnnnnnnnnnnnnnnnnnnnnnnnnnnnnnnnnnnnnnnnnnnnnnnnnnnnnnnnnnnnnnnnnnnnnnnnnnnnnnnnnnnnnnnnnnnnnnnnnnnnnnnnnnnnnnnnnnnnnnnnnnnnnnnnnnnnnnnnnnnnnnnnnnnnnnnnnnnnnnnnnnnnnnnnnnnnnnnnnnnnnnnnnnnnnnnnnnnnnnnnnnnnnnnnnnnnnnnnnnnnnnnnnnnnnnnnnnnnnnnnnnnnnnnnnnnnnnnnnnnnnnnnnnnnnnnnnnnnnnnnnnnnnnnnnnnnnnnnnnnnnnnnnnnnnnnnnnnnnnnnnnnnnnnnnnnnnnnnnnnnnnnnnnnnnnnnnnnnnnnnnnnnnnnnnnnnnnnnnnnnnnnnnnnnnnnnnnnnnnnnnnnnnnnnnnnnnnnnnnnnnnnnnnnnnnnnnnnnnnnnnnnnnnnnnnnnnnnnnnnnnnnnnnnnnnnnnnnnnnnnnnnnnnnnnnnnnnnnnnnnnnnnnnnnnnnnnnnnnnnnnnnnnnnnnnnnnnnnnnnnnnnnnnnnnnnnnnnnnnnnnnnnnnnnnnnnnnnnnnnnnnnnnnnnnnnnnnnnnnnnnnnnnnnnnnnnnnnnnnnnnnnnnnnnnnnnnnnnnnnnnnnnnnnnnnnnnnnnnnnnnnnnnnnnnnnnnnnnnnnnnnnnnnnnnnnnnnnnnnnnnnnnnnnnnnnnnnnnnnnnnnnnnnnnnnnnnnnnnnnnnnnnnnnnnnnnnnnnnnnnnnnnnnnnnnnnnnnnnnnnnnnnnnnnnnnnnnnnnnnnnnnnnnnnnnnnnnnnnnnnnnnnnnnnnnnnnnnnnnnnnnnnnnnnnnnnnnnnnnnnnnnnnnnnnnnnnnnnnnnnnnnnnnnnnnnnnnnnnnnnnnnnnnnnnnnnnnnnnnnnnnnnnnnnnnnnnnnnnnnnnnnnnnnnnnnnnnnnnnnnnnnnnnnnnnnnnnnnnnnnnnnnnnnnnnnnnnnnnnnnnnnnnnnnnnnnnnnnnnnnnnnnnnnnnnnnnnnnnnnnnnnnnnnnnnnnnnnnnnnnnnnnnnnnnnnnnnnnnnnnnnnnnnnnnnnnnnnnnnnnnnnnnnnnnnnnnnnnnnnnnnnnnnnnnnnnnnnnnnnnnnnnnnnnnnnnnnnnnnnnnnnnnnnnnnnnnnnnnnnnnnnnnnnnnnnnnnnnnnnnnnnnnnnnnnnnnnnnnnnnnnnnnnnnnnnnnnnnnnnnnnnnnnnnnnnnnnnnnnnnnnnnnnnnnnnnnnnnnnnnnnnnnnnnnnnnnnnnnnnnnnnnnnnnnnnnnnnnnnnnnnnnnnnnnnnnnnnnnnnnnnnnnnnnnnnnnnnnnnnnnnnnnnnnnnnnnnnnnnnnnnnnnnnnnnnnnnnnnnnnnnnnnnnnnnnnnnnnnnnnnnnnnnnnnnnnnnnnnnnnnnnnnnnnnnnnnnnnnnnnnnnnnnnnnnnnnnnnnnnnnnnnnnnnnnnnnnnnnnnnnnnnnnnnnnnnnnnnnnnnnnnnnnnnnnnnnnnnnnnnnnnnnnnnnnnnnnnnnnnnnnnnnnnnnnnnnnnnnnnnnnnnnnnnnnnnnnnnnnnnnnnnnnnnnnnnnnnnnnnnnnnnnnnnnnnnnnnnnnnnnnnnnnnnnnnnnnnnnnnnnnnnnnnnnnnnnnnnnnnnnnnnnnnnnnnnnnnnnnnnnnnnnnnnnnnnnnnnnnnnnnnnnnnnnnnnnnnnnnnnnnnnnnnnnnnnnnnnnnnnnnnnnnnnnnnnnnnnnnnnnnnnnnnnnnnnnnnnnnnnnnnnnnnnnnnnnnnnnnnnnnnnnnnnnnnnnnnnnnnnnnnnnnnnnnnnnnnnnnnnnnnnnnnnnnnnnnnnnnnnnnnnnnnnnnnnnnnnnnnnnnnnnnnnnnnnnnnnnnnnnnnnnnnnnnnnnnnnnnnnnnnnnnnnnnnnnnnnnnnnnnnnnnnnnnnnnnnnnnnnnnnnnnnnnnnnnnnnnnnnnnnnnnnnnnnnnnnnnnnnnnnnnnnnnnnnnnnnnnnnnnnnnnnnnnnnnnnnnnnnnnnnnnnnnnnnnnnnnnnnnnnnnnnnnnnnnnnnnnnnnnnnnnnnnnnnnnnnnnnnnnnnnnnnnnnnnnnnnnnnnnnnnnnnnnnnnnnnnnnnnnnnnnnnnnnnnnnnnnnnnnnnnnnnnnnnnnnnnnnnnnnnnnnnnnnnnnnnnnnnnnnnnnnnnnnnnnnnnnnnnnnnnnnnnnnnnnnnnnnnnnnnnnnnnnnnnnnnnnnnnnnnnnnnnnnnnnnnnnnnnnnnnnnnnnnnnnnnnnnnnnnnnnnnnnnnnnnnnnnnnnnnnnnnnnnnnnnnnnnnnnnnnnnnnnnnnnnnnnnnnnnnnnnnnnnnnnnnnnnnnnnnnnnnnnnnnnnnnnnnnnnnnnnnnnnnnnnnnnnnnnnnnnnnnnnnnnnnnnnnnnnnnnnnnnnnnnnnnnnnnnnnnnnnnnnnnnnnnnnnnnnnnnnnnnnnnnnnnnnnnnnnnnnnnnnnnnnnnnnnnnnnnnnnnnnnnnnnnnnnnnnnnnnnnnnnnnnnnnnnnnnnnnnnnnnnnnnnnnnnnnnnnnnnnnnnnnnnnnnnnnnnnnnnnnnnnnnnnnnnnnnnnnnnnnnnnnnnnnnnnnnnnnnnnnnnnnnnnnnnnnnnnnnnnnnnnnnnnnnnnnnnnnnnnnnnnnnnnnnnnnnnnnnnnnnnnnnnnnnnnnnnnnnnnnnnnnnnnnnnnnnnnnnnnnnnnnnnnnnnnnnnnnnnnnnnnnnnnnnnnnnnnnnnnnnnnnnnnnnnnnnnnnnnnnnnnnnnnnnnnnnnnnnnnnnnnnnnnnnnnnnnnnnnnnnnnnnnnnnnnnnnnnnnnnnnnnnnnnnnnnnnnnnnnnnnnnnnnnnnnnnnnnnnnnnnnnnnnnnnnnnnnnnnnnnnnnnnnnnnnnnnnnnnnnnnnnnnnnnnnnnnnnnnnnnnnnnnnnnnnnnnnnnnnnnnnnnnnnnnnnnnnnnnnnnnnnnnnnnnnnnnnnnnnnnnnnnnnnnnnnnnnnnnnnnnnnnnnnnnnnnnnnnnnnnnnnnnnnnnnnnnnnnnnnnnnnnnnnnnnnnnnnnnnnnnnnnnnnnnnnnnnnnnnnnnnnnnnnnnnnnnnnnnnnnnnnnnnnnnnnnnnnnnnnnnnnnnnnnnnnnnnnnnnnnnnnnnnnnnnnnnnnnnnnnnnnnnnnnnnnnnnnnnnnnnnnnnnnnnnnnnnnnnnnnnnnnnnnnnnnnnnnnnnnnnnnnnnnnnnnnnnnnnnnnnnnnnnnnnnnnnnnnnnnnnnnnnnnnnnnnnnnnnnnnnnnnnnnnnnnnnnnnnnnnnnnnnnnnnnnnnnnnnnnnnnnnnnnnnnnnnnnnnnnnnnnnnnnnnnnnnnnnnnnnnnnnnnnnnnnnnnnnnnnnnnnnnnnnnnnnnnnnnnnnnnnnnnnnnnnnnnnnnnnnnnnnnnnnnnnnnnnnnnnnnnnnnnnnnnnnnnnnnnnnnnnnnnnnnnnnnnnnnnnnnnnnnnnnnnnnnnnnnnnnnnnnnnnnnnnnnnnnnnnnnnnnnnnnnnnnnnnnnnnnnnnnnnnnnnnnnnnnnnnnnnnnnnnnnnnnnnnnnnnnnnnnnnnnnnnnnnnnnnnnnnnnnnnnnnnnnnnnnnnnnnnnnnnnnnnnnnnnnnnnnnnnnnnnnnnnnnnnnnnnnnnnnnnnnnnnnnnnnnnnnnnnnnnnnnnnnnnnnnnnnnnnnnnnnnnnnnnnnnnnnnnnnnnnnnnnnnnnnnnnnnnnnnnnnnnnnnnnnnnnnnnnnnnnnnnnnnnnnnnnnnnnnnnnnnnnnnnnnnnnnnnnnnnnnnnnnnnnnnnnnnnnnnnnnnnnnnnnnnnnnnnnnnnnnnnnnnnnnnnnnnnnnnnnnnnnnnnnnnnnnnnnnnnnnnnnnnnnnnnnnnnnnnnnnnnnnnnnnnnnnnnnnnnnnnnnnnnnnnnnnnnnnnnnnnnnnnnnnnnnnnnnnnnnnnnnnnnnnnnnnnnnnnnnnnnnnnnnnnnnnnnnnnnnnnnnnnnnnnnnnnnnnnnnnnnnnnnnnnnnnnnnnnnnnnnnnnnnnnnnnnnnnnnnnnnnnnnnnnnnnnnnnnnnnnnnnnnnnnnnnnnnnnnnnnnnnnnnnnnnnnnnnnnnnnnnnnnnnnnnnnnnnnnnnnnnnnnnnnnnnnnnnnnnnnnnnnnnnnnnnnnnnnnnnnnnnnnnnnnnnnnnnnnnnnnnnnnnnnnnnnnnnnnnnnnnnnnnnnnnnnnnnnnnnnnnnnnnnnnnnnnnnnnnnnnnnnnnnnnnnnnnnnnnnnnnnnnnnnnnnnnnnnnnnnnnnnnnnnnnnnnnnnnnnnnnnnnnnnnnnnnnnnnnnnnnnnnnnnnnnnnnnnnnnnnnnnnnnnnnnnnnnnnnnnnnnnnnnnnnnnnnnnnnnnnnnnnnnnnnnnnnnnnnnnnnnnnnnnnnnnnnnnnnnnnnnnnnnnnnnnnnnnnnnnnnnnnnnnnnnnnnnnnnnnnnnnnnnnnnnnnnnnnnnnnnnnnnnnnnnnnnnnnnnnnnnnnnnnnnnnnnnnnnnnnnnnnnnnnnnnnnnnnnnnnnnnnnnnnnnnnnnnnnnnnnnnnnnnnnnnnnnnnnnnnnnnnnnnnnnnnnnnnnnnnnnnnnnnnnnnnnnnnnnnnnnnnnnnnnnnnnnnnnnnnnnnnnnnnnnnnnnnnnnnnnnnnnnnnnnnnnnnnnnnnnnnnnnnnnnnnnnnnnnnnnnnnnnnnnnnnnnnnnnnnnnnnnnnnnnnnnnnnnnnnnnnnnnnnnnnnnnnnnnnnnnnnnnnnnnnnnnnnnnnnnnnnnnnnnnnnnnnnnnnnnnnnnnnnnnnnnnnnnnnnnnnnnnnnnnnnnnnnnnnnnnnnnnnnnnnnnnnnnnnnnnnnnnnnnnnnnnnnnnnnnnnnnnnnnnnnnnnnnnnnnnnnnnnnnnnnnnnnnnnnnnnnnnnnnnnnnnnnnnnnnnnnnnnnnnnnnnnnnnnnnnnnnnnnnnnnnnnnnnnnnnnnnnnnnnnnnnnnnnnnnnnnnnnnnnnnnnnnnnnnnnnnnnnnnnnnnnnnnnnnnnnnnnnnnnnnnnnnnnnnnnnnnnnnnnnnnnnnnnnnnnnnnnnnnnnnnnnnnnnnnnnnnnnnnnnnnnnnnnnnnnnnnnnnnnnnnnnnnnnnnnnnnnnnnnnnnnnnnnnnnnnnnnnnnnnnnnnnnnnnnnnnnnnnnnnnnnnnnnnnnnnnnnnnnnnnnnnnnnnnnnnnnnnnnnnnnnnnnnnnnnnnnnnnnnnnnnnnnnnnnnnnnnnnnnnnnnnnnnnnnnnnnnnnnnnnnnnnnnnnnnnnnnnnnnnnnnnnnnnnnnnnnnnnnnnnnnnnnnnnnnnnnnnnnnnnnnnnnnnnnnnnnnnnnnnnnnnnnnnnnnnnnnnnnnnnnnnnnnnnnnnnnnnnnnnnnnnnnnnnnnnnnnnnnnnnnnnnnnnnnnnnnnnnnnnnnnnnnnnnnnnnnnnnnnnnnnnnnnnnnnnnnnnnnnnnnnnnnnnnnnnnnnnnnnnnnnnnnnnnnnnnnnnnnnnnnnnnnnnnnnnnnnnnnnnnnnnnnnnnnnnnnnnnnnnnnnnnnnnnnnnnnnnnnnnnnnnnnnnnnnnnnnnnnnnnnnnnnnnnnnnnnnnnnnnnnnnnnnnnnnnnnnnnnnnnnnnnnnnnnnnnnnnnnnnnnnnnnnnnnnnnnnnnnnnnnnnnnnnnnnnnnnnnnnnnnnnnnnnnnnnnnnnnnnnnnnnnnnnnnnnnnnnnnnnnnnnnnnnnnnnnnnnnnnnnnnnnnnnnnnnnnnnnnnnnnnnnnnnnnnnnnnnnnnnnnnnnnnnnnnnnnnnnnnnnnnnnnnnnnnnnnnnnnnnnnnnnnnnnnnnnnnnnnnnnnnnnnnnnnnnnnnnnnnnnnnnnnnnnnnnnnnnnnnnnnnnnnnnnnnnnnnnnnnnnnnnnnnnnnnnnnnnnnnnnnnnnnnnnnnnnnnnnnnnnnnnnnnnnnnnnnnnnnnnnnnnnnnnnnnnnnnnnnnnnnnnnnnnnnnnnnnnnnnnnnnnnnnnnnnnnnnnnnnnnnnnnnnnnnnnnnnnnnnnnnnnnnnnnnnnnnnnnnnnnnnnnnnnnnnnnnnnnnnnnnnnnnnnnnnnnnnnnnnnnnnnnnnnnnnnnnnnnnnnnnnnnnnnnnnnnnnnnnnnnnnnnnnnnnnnnnnnnnnnnnnnnnnnnnnnnnnnnnnnnnnnnnnnnnnnnnnnnnnnnnnnnnnnnnnnnnnnnnnnnnnnnnnnnnnnnnnnnnnnnnnnnnnnnnnnnnnnnnnnnnnnnnnnnnnnnnnnnnnnnnnnnnnnnnnnnnnnnnnnnnnnnnnnnnnnnnnnnnnnnnnnnnnnnnnnnnnnnnnnnnnnnnnnnnnnnnnnnnnnnnnnnnnnnnnnnnnnnnnnnnnnnnnnnnnnnnnnnnnnnnnnnnnnnnnnnnnnnnnnnnnnnnnnnnnnnnnnnnnnnnnnnnnnnnnnnnnnnnnnnnnnnnnnnnnnnnnnnnnnnnnnnnnnnnnnnnnnnnnnnnnnnnnnnnnnnnnnnnnnnnnnnnnnnnnnnnnnnnnnnnnnnnnnnnnnnnnnnnnnnnnnnnnnnnnnnnnnnnnnnnnnnnnnnnnnnnnnnnnnnnnnnnnnnnnnnnnnnnnnnnnnnnnnnnnnnnnnnnnnnnnnnnnnnnnnnnnnnnnnnnnnnnnnnnnnnnnnnnnnnnnnnnnnnnnnnnnnnnnnnnnnnnnnnnnnnnnnnnnnnnnnnnnnnnnnnnnnnnnnnnnnnnnnnnnnnnnnnnnnnnnnnnnnnnnnnnnnnnnnnnnnnnnnnnnnnnnnnnnnnnnnnnnnnnnnnnnnnnnnnnnnnnnnnnnnnnnnnnnnnnnnnnnnnnnnnnnnnnnnnnnnnnnnnnnnnnnnnnnnnnnnnnnnnnnnnnnnnnnnnnnnnnnnnnnnnnnnnnnnnnnnnnnnnnnnnnnnnnnnnnnnnnnnnnnnnnnnnnnnnnnnnnnnnnnnnnnnnnnnnnnnnnnnnnnnnnnnnnnnnnnnnnnnnnnnnnnnnnnnnnnnnnnnnnnnnnnnnnnnnnnnnnnnnnnnnnnnnnnnnnnnnnnnnnnnnnnnnnnnnnnnnnnnnnnnnnnnnnnnnnnnnnnnnnnnnnnnnnnnnnnnnnnnnnnnnnnnnnnnnnnnnnnnnnnnnnnnnnnnnnnnnnnnnnnnnnnnnnnnnnnnnnnnnnnnnnnnnnnnnnnnnnnnnnnnnnnnnnnnnnnnnnnnnnnnnnnnnnnnnnnnnnnnnnnnnnnnnnnnnnnnnnnnnnnnnnnnnnnnnnnnnnnnnnnnnnnnnnnnnnnnnnnnnnnnnnnnnnnnnnnnnnnnnnnnnnnnnnnnnnnnnnnnnnnnnnnnnnnnnnnnnnnnnnnnnnnnnnnnnnnnnnnnnnnnnnnnnnnnnnnnnnnnnnnnnnnnnnnnnnnnnnnnnnnnnnnnnnnnnnnnnnnnnnnnnnnnnnnnnnnnnnnnnnnnnnnnnnnnnnnnnnnnnnnnnnnnnnnnnnnnnnnnnnnnnnnnnnnnnnnnnnnnnnnnnnnnnnnnnnnnnnnnnnnnnnnnnnnnnnnnnnnnnnnnnnnnnnnnnnnnnnnnnnnnnnnnnnnnnnnnnnnnnnnnnnnnnnnnnnnnnnnnnnnnnnnnnnnnnnnnnnnnnnnnnnnnnnnnnnnnnnnnnnnnnnnnnnnnnnnnnnnnnnnnnnnnnnnnnnnnnnnnnnnnnnnnnnnnnnnnnnnnnnnnnnnnnnnnnnnnnnnnnnnnnnnnnnnnnnnnnnnnnnnnnnnnnnnnnnnnnnnnnnnnnnnnnnnnnnnnnnnnnnnnnnnnnnnnnnnnnnnnnnnnnnnnnnnnnnnnnnnnnnnnnnnnnnnnnnnnnnnnnnnnnnnnnnnnnnnnnnnnnnnnnnnnnnnnnnnnnnnnnnnnnnnnnnnnnnnnnnnnnnnnnnnnnnnnnnnnnnnnnnnnnnnnnnnnnnnnnnnnnnnnnnnnnnnnnnnnnnnnnnnnnnnnnnnnnnnnnnnnnnnnnnnnnnnnnnnnnnnnnnnnnnnnnnnnnnnnnnnnnnnnnnnnnnnnnnnnnnnnnnnnnnnnnnnnnnnnnnnnnnnnnnnnnnnnnnnnnnnnnnnnnnnnnnnnnnnnnnnnnnnnnnnnnnnnnnnnnnnnnnnnnnnnnnnnnnnnnnnnnnnnnnnnnnnnnnnnnnnnnnnnnnnnnnnnnnnnnnnnnnnnnnnnnnnnnnnnnnnnnnnnnnnnnnnnnnnnnnnnnnnnnnnnnnnnnnnnnnnnnnnnnnnnnnnnnnnnnnnnnnnnnnnnnnnnnnnnnnnnnnnnnnnnnnnnnnnnnnnnnnnnnnnnnnnnnnnnnnnnnnnnnnnnnnnnnnnnnnnnnnnnnnnnnnnnnnnnnnnnnnnnnnnnnnnnnnnnnnnnnnnnnnnnnnnnnnnnnnnnnnnnnnnnnnnnnnnnnnnnnnnnnnnnnnnnnnnnnnnnnnnnnnnnnnnnnnnnnnnnnnnnnnnnnnnnnnnnnnnnnnnnnnnnnnnnnnnnnnnnnnnnnnnnnnnnnnnnnnnnnnnnnnnnnnnnnnnnnnnnnnnnnnnnnnnnnnnnnnnnnnnnnnnnnnnnnnnnnnnnnnnnnnnnnnnnnnnnnnnnnnnnnnnnnnnnnnnnnnnnnnnnnnnnnnnnnnnnnnnnnnnnnnnnnnnnnnnnnnnnnnnnnnnnnnnnnnnnnnnnnnnnnnnnnnnnnnnnnnnnnnnnnnnnnnnnnnnnnnnnnnnnnnnnnnnnnnnnnnnnnnnnnnnnnnnnnnnnnnnnnnnnnnnnnnnnnnnnnnnnnnnnnnnnnnnnnnnnnnnnnnnnnnnnnnnnnnnnnnnnnnnnnnnnnnnnnnnnnnnnnnnnnnnnnnnnnnnnnnnnnnnnnnnnnnnnnnnnnnnnnnnnnnnnnnnnnnnnnnnnnnnnnnnnnnnnnnnnnnnnnnnnnnnnnnnnnnnnnnnnnnnnnnnnnnnnnnnnnnnnnnnnnnnnnnnnnnnnnnnnnnnnnnnnnnnnnnnnnnnnnnnnnnnnnnnnnnnnnnnnnnnnnnnnnnnnnnnnnnnnnnnnnnnnnnnnnnnnnnnnnnnnnnnnnnnnnnnnnnnnnnnnnnnnnnnnnnnnnnnnnnnnnnnnnnnnnnnnnnnnnnnnnnnnnnnnnnnnnnnnnnnnnnnnnnnnnnnnnnnnnnnnnnnnnnnnnnnnnnnnnnnnnnnnnnnnnnnnnnnnnnnnnnnnnnnnnnnnnnnnnnnnnnnnnnnnnnnnnnnnnnnnnnnnnnnnnnnnnnnnnnnnnnnnnnnnnnnnnnnnnnnnnnnnnnnnnnnnnnnnnnnnnnnnnnnnnnnnnnnnnnnnnnnnnnnnnnnnnnnnnnnnnnnnnnnnnnnnnnnnnnnnnnnnnnnnnnnnnnnnnnnnnnnnnnnnnnnnnnnnnnnnnnnnnnnnnnnnnnnnnnnnnnnnnnnnnnnnnnnnnnnnnnnnnnnnnnnnnnnnnnnnnnnnnnnnnnnnnnnnnnnnnnnnnnnnnnnnnnnnnnnnnnnnnnnnnnnnnnnnnnnnnnnnnnnnnnnnnnnnnnnnnnnnnnnnnnnnnnnnnnnnnnnnnnnnnnnnnnnnnnnnnnnnnnnnnnnnnnnnnnnnnnnnnnnnnnnnnnnnnnnnnnnnnnnnnnnnnnnnnnnnnnnnnnnnnnnnnnnnnnnnnnnnnnnnnnnnnnnnnnnnnnnnnnnnnnnnnnnnnnnnnnnnnnnnnnnnnnnnnnnnnnnnnnnnnnnnnnnnnnnnnnnnnnnnnnnnnnnnnnnnnnnnnnnnnnnnnnnnnnnnnnnnnnnnnnnnnnnnnnnnnnnnnnnnnnnnnnnnnnnnnnnnnnnnnnnnnnnnnnnnnnnnnnnnnnnnnnnnnnnnnnnnnnnnnnnnnnnnnnnnnnnnnnnnnnnnnnnnnnnnnnnnnnnnnnnnnnnnnnnnnnnnnnnnnnnnnnnnnnnnnnnnnnnnnnnnnnnnnnnnnnnnnnnnnnnnnnnnnnnnnnnnnnnnnnnnnnnnnnnnnnnnnnnnnnnnnnnnnnnnnnnnnnnnnnnnnnnnnnnnnnnnnnnnnnnnnnnnnnnnnnnnnnnnnnnnnnnnnnnnnnnnnnnnnnnnnnnnnnnnnnnnnnnnnnnnnnnnnnnnnnnnnnnnnnnnnnnnnnnnnnnnnnnnnnnnnnnnnnnnnnnnnnnnnnnnnnnnnnnnnnnnnnnnnnnnnnnnnnnnnnnnnnnnnnnnnnnnnnnnnnnnnnnnnnnnnnnnnnnnnnnnnnnnnnnnnnnnnnnnnnnnnnnnnnnnnnnnnnnnnnnnnnnnnnnnnnnnnnnnnnnnnnnnnnnnnnnnnnnnnnnnnnnnnnnnnnnnnnnnnnnnnnnnnnnnnnnnnnnnnnnnnnnnnnnnnnnnnnnnnnnnnnnnnnnnnnnnnnnnnnnnnnnnnnnnnnnnnnnnnnnnnnnnnnnnnnnnnnnnnnnnnnnnnnnnnnnnnnnnnnnnnnnnnnnnnnnnnnnnnnnnnnnnnnnnnnnnnnnnnnnnnnnnnnnnnnnnnnnnnnnnnnnnnnnnnnnnnnnnnnnnnnnnnnnnnnnnnnnnnnnnnnnnnnnnnnnnnnnnnnnnnnnnnnnnnnnnnnnnnnnnnnnnnnnnnnnnnnnnnnnnnnnnnnnnnnnnnnnnnnnnnnnnnnnnnnnnnnnnnnnnnnnnnnnnnnnnnnnnnnnnnnnnnnnnnnnnnnnnnnnnnnnnnnnnnnnnnnnnnnnnnnnnnnnnnnnnnnnnnnnnnnnnnnnnnnnnnnnnnnnnnnnnnnnnnnnnnnnnnnnnnnnnnnnnnnnnnnnnnnnnnnnnnnnnnnnnnnnnnnnnnnnnnnnnnnnnnnnnnnnnnnnnnnnnnnnnnnnnnnnnnnnnnnnnnnnnnnnnnnnnnnnnnnnnnnnnnnnnnnnnnnnnnnnnnnnnnnnnnnnnnnnnnnnnnnnnnnnnnnnnnnnnnnnnnnnnnnnnnnnnnnnnnnnnnnnnnnnnnnnnnnnnnnnnnnnnnnnnnnnnnnnnnnnnnnnnnnnnnnnnnnnnnnnnnnnnnnnnnnnnnnnnnnnnnnnnnnnnnnnnnnnnnnnnnnnnnnnnnnnnnnnnnnnnnnnnnnnnnnnnnnnnnnnnnnnnnnnnnnnnnnnnnnnnnnnnnnnnnnnnnnnnnnnnnnnnnnnnnnnnnnnnnnnnnnnnnnnnnnnnnnnnnnnnnnnnnnnnnnnnnnnnnnnnnnnnnnnnnnnnnnnnnnnnnnnnnnnnnnnnnnnnnnnnnnnnnnnnnnnnnnnnnnnnnnnnnnnnnnnnnnnnnnnnnnnnnnnnnnnnnnnnnnnnnnnnnnnnnnnnnnnnnnnnnnnnnnnnnnnnnnnnnnnnnnnnnnnnnnnnnnnnnnnnnnnnnnnnnnnnnnnnnnnnnnnnnnnnnnnnnnnnnnnnnnnnnnnnnnnnnnnnnnnnnnnnnnnnnnnnnnnnnnnnnnnnnnnnnnnnnnnnnnnnnnnnnnnnnnnnnnnnnnnnnnnnnnnnnnnnnnnnnnnnnnnnnnnnnnnnnnnnnnnnnnnnnnnnnnnnnnnnnnnnnnnnnnnnnnnnnnnnnnnnnnnnnnnnnnnnnnnnnnnnnnnnnnnnnnnnnnnnnnnnnnnnnnnnnnnnnnnnnnnnnnnnnnnnnnnnnnnnnnnnnnnnnnnnnnnnnnnnnnnnnnnnnnnnnnnnnnnnnnnnnnnnnnnnnnnnnnnnnnnnnnnnnnnnnnnnnnnnnnnnnnnnnnnnnnnnnnnnnnnnnnnnnnnnnnnnnnnnnnnnnnnnnnnnnnnnnnnnnnnnnnnnnnnnnnnnnnnnnnnnnnnnnnnnnnnnnnnnnnnnnnnnnnnnnnnnnnnnnnnnnnnnnnnnnnnnnnnnnnnnnnnnnnnnnnnnnnnnnnnnnnnnnnnnnnnnnnnnnnnnnnnnnnnnnnnnnnnnnnnnnnnnnnnnnnnnnnnnnnnnnnnnnnnnnnnnnnnnnnnnnnnnnnnnnnnnnnnnnnnnnnnnnnnnnnnnnnnnnnnnnnnnnnnnnnnnnnnnnnnnnnnnnnnnnnnnnnnnnnnnnnnnnnnnnnnnnnnnnnnnnnnnnnnnnnnnnnnnnnnnnnnnnnnnnnnnnnnnnnnnnnnnnnnnnnnnnnnnnnnnnnnnnnnnnnnnnnnnnnnnnnnnnnnnnnnnnnnnnnnnnnnnnnnnnnnnnnnnnnnnnnnnnnnnnnnnnnnnnnnnnnnnnnnnnnnnnnnnnnnnnnnnnnnnnnnnnnnnnnnnnnnnnnnnnnnnnnnnnnnnnnnnnnnnnnnnnnnnnnnnnnnnnnnnnnnnnnnnnnnnnnnnnnnnnnnnnnnnnnnnnnnnnnnnnnnnnnnnnnnnnnnnnnnnnnnnnnnnnnnnnnnnnnnnnnnnnnnnnnnnnnnnnnnnnnnnnnnnnnnnnnnnnnnnnnnnnnnnnnnnnnnnnnnnnnnnnnnnnnnnnnnnnnnnnnnnnnnnnnnnnnnnnnnnnnnnnnnnnnnnnnnnnnnnnnnnnnnnnnnnnnnnnnnnnnnnnnnnnnnnnnnnnnnnnnnnnnnnnnnnnnnnnnnnnnnnnnnnnnnnnnnnnnnnnnnnnnnnnnnnnnnnnnnnnnnnnnnnnnnnnnnnnnnnnnnnnnnnnnnnnnnnnnnnnnnnnnnnnnnnnnnnnnnnnnnnnnnnnnnnnnnnnnnnnnnnnnnnnnnnnnnnnnnnnnnnnnnnnnnnnnnnnnnnnnnnnnnnnnnnnnnnnnnnnnnnnnnnnnnnnnnnnnnnnnnnnnnnnnnnnnnnnnnnnnnnnnnnnnnnnnnnnnnnnnnnnnnnnnnnnnnnnnnnnnnnnnnnnnnnnnnnnnnnnnnnnnnnnnnnnnnnnnnnnnnnnnnnnnnnnnnnnnnnnnnnnnnnnnnnnnnnnnnnnnnnnnnnnnnnnnnnnnnnnnnnnnnnnnnnnnnnnnnnnnnnnnnnnnnnnnnnnnnnnnnnnnnnnnnnnnnnnnnnnnnnnnnnnnnnnnnnnnnnnnnnnnnnnnnnnnnnnnnnnnnnnnnnnnnnnnnnnnnnnnnnnnnnnnnnnnnnnnnnnnnnnnnnnnnnnnnnnnnnnnnnnnnnnnnnnnnnnnnnnnnnnnnnnnnnnnnnnnnnnnnnnnnnnnnnnnnnnnnnnnnnnnnnnnnnnnnnnnnnnnnnnnnnnnnnnnnnnnnnnnnnnnnnnnnnnnnnnnnnnnnnnnnnnnnnnnnnnnnnnnnnnnnnnnnnnnnnnnnnnnnnnnnnnnnnnnnnnnnnnnnnnnnnnnnnnnnnnnnnnnnnnnnnnnnnnnnnnnnnnnnnnnnnnnnnnnnnnnnnnnnnnnnnnnnnnnnnnnnnnnnnnnnnnnnnnnnnnnnnnnnnnnnnnnnnnnnnnnnnnnnnnnnnnnnnnnnnnnnnnnnnnnnnnnnnnnnnnnnnnnnnnnnnnnnnnnnnnnnnnnnnnnnnnnnnnnnnnnnnnnnnnnnnnnnnnnnnnnnnnnnnnnnnnnnnnnnnnnnnnnnnnnnnnnnnnnnnnnnnnnnnnnnnnnnnnnnnnnnnnnnnnnnnnnnnnnnnnnnnnnnnnnnnnnnnnnnnnnnnnnnnnnnnnnnnnnnnnnnnnnnnnnnnnnnnnnnnnnnnnnnnnnnnnnnnnnnnnnnnnnnnnnnnnnnnnnnnnnnnnnnnnnnnnnnnnnnnnnnnnnnnnnnnnnnnnnnnnnnnnnnnnnnnnnnnnnnnnnnnnnnnnnnnnnnnnnnnnnnnnnnnnnnnnnnnnnnnnnnnnnnnnnnnnnnnnnnnnnnnnnnnnnnnnnnnnnnnnnnnnnnnnnnnnnnnnnnnnnnnnnnnnnnnnnnnnnnnnnnnnnnnnnnnnnnnnnnnnnnnnnnnnnnnnnnnnnnnnnnnnnnnnnnnnnnnnnnnnnnnnnnnnnnnnnnnnnnnnnnnnnnnnnnnnnnnnnnnnnnnnnnnnnnnnnnnnnnnnnnnnnnnnnnnnnnnnnnnnnnnnnnnnnnnnnnnnnnnnnnnnnnnnnnnnnnnnnnnnnnnnnnnnnnnnnnnnnnnnnnnnnnnnnnnnnnnnnnnnnnnnnnnnnnnnnnnnnnnnnnnnnnnnnnnnnnnnnnnnnnnnnnnnnnnnnnnnnnnnnnnnnnnnnnnnnnnnnnnnnnnnnnnnnnnnnnnnnnnnnnnnnnnnnnnnnnnnnnnnnnnnnnnnnnnnnnnnnnnnnnnnnnnnnnnnnnnnnnnnnnnnnnnnnnnnnnnnnnnnnnnnnnnnnnnnnnnnnnnnnnnnnnnnnnnnnnnnnnnnnnnnnnnnnnnnnnnnnnnnnnnnnnnnnnnnnnnnnnnnnnnnnnnnnnnnnnnnnnnnnnnnnnnnnnnnnnnnnnnnnnnnnnnnnnnnnnnnnnnnnnnnnnnnnnnnnnnnnnnnnnnnnnnnnnnnnnnnnnnnnnnnnnnnnnnnnnnnnnnnnnnnnnnnnnnnnnnnnnnnnnnnnnnnnnnnnnnnnnnnnnnnnnnnnnnnnnnnnnnnnnnnnnnnnnnnnnnnnnnnnnnnnnnnnnnnnnnnnnnnnnnnnnnnnnnnnnnnnnnnnnnnnnnnnnnnnnnnnnnnnnnnnnnnnnnnnnnnnnnnnnnnnnnnnnnnnnnnnnnnnnnnnnnnnnnnnnnnnnnnnnnnnnnnnnnnnnnnnnnnnnnnnnnnnnnnnnnnnnnnnnnnnnnnnnnnnnnnnnnnnnnnnnnnnnnnnnnnnnnnnnnnnnnnnnnnnnnnnnnnnnnnnnnnnnnnnnnnnnnnnnnnnnnnnnnnnnnnnnnnnnnnnnnnnnnnnnnnnnnnnnnnnnnnnnnnnnnnnnnnnnnnnnnnnnnnnnnnnnnnnnnnnnnnnnnnnnnnnnnnnnnnnnnnnnnnnnnnnnnnnnnnnnnnnnnnnnnnnnnnnnnnnnnnnnnnnnnnnnnnnnnnnnnnnnnnnnnnnnnnnnnnnnnnnnnnnnnnnnnnnnnnnnnnnnnnnnnnnnnnnnnnnnnnnnnnnnnnnnnnnnnnnnnnnnnnnnnnnnnnnnnnnnnnnnnnnnnnnnnnnnnnnnnnnnnnnnnnnnnnnnnnnnnnnnnnnnnnnnnnnnnnnnnnnnnnnnnnnnnnnnnnnnnnnnnnnnnnnnnnnnnnnnnnnnnnnnnnnnnnnnnnnnnnnnnnnnnnnnnnnnnnnnnnnnnnnnnnnnnnnnnnnnnnnnnnnnnnnnnnnnnnnnnnnnnnnnnnnnnnnnnnnnnnnnnnnnnnnnnnnnnnnnnnnnnnnnnnnnnnnnnnnnnnnnnnnnnnnnnnnnnnnnnnnnnnnnnnnnnnnnnnnnnnnnnnnnnnnnnnnnnnnnnnnnnnnnnnnnnnnnnnnnnnnnnnnnnnnnnnnnnnnnnnnnnnnnnnnnnnnnnnnnnnnnnnnnnnnnnnnnnnnnnnnnnnnnnnnnnnnnnnnnnnnnnnnnnnnnnnnnnnnnnnnnnnnnnnnnnnnnnnnnnnnnnnnnnnnnnnnnnnnnnnnnnnnnnnnnnnnnnnnnnnnnnnnnnnnnnnnnnnnnnnnnnnnnnnnnnnnnnnnnnnnnnnnnnnnnnnnnnnnnnnnnnnnnnnnnnnnnnnnnnnnnnnnnnnnnnnnnnnnnnnnnnnnnnnnnnnnnnnnnnnnnnnnnnnnnnnnnnnnnnnnnnnnnnnnnnnnnnnnnnnnnnnnnnnnnnnnnnnnnnnnnnnnnnnnnnnnnnnnnnnnnnnnnnnnnnnnnnnnnnnnnnnnnnnnnnnnnnnnnnnnnnnnnnnnnnnnnnnnnnnnnnnnnnnnnnnnnnnnnnnnnnnnnnnnnnnnnnnnnnnnnnnnnnnnnnnnnnnnnnnnnnnnnnnnnnnnnnnnnnnnnnnnnnnnnnnnnnnnnnnnnnnnnnnnnnnnnnnnnnnnnnnnnnnnnnnnnnnnnnnnnnnnnnnnnnnnnnnnnnnnnnnnnnnnnnnnnnnnnnnnnnnnnnnnnnnnnnnnnnnnnnnnnnnnnnnnnnnnnnnnnnnnnnnnnnnnnnnnnnnnnnnnnnnnnnnnnnnnnnnnnnnnnnnnnnnnnnnnnnnnnnnnnnnnnnnnnnnnnnnnnnnnnnnnnnnnnnnnnnnnnnnnnnnnnnnnnnnnnnnnnnnnnnnnnnnnnnnnnnnnnnnnnnnnnnnnnnnnnnnnnnnnnnnnnnnnnnnnnnnnnnnnnnnnnnnnnnnnnnnnnnnnnnnnnnnnnnnnnnnnnnnnnnnnnnnnnnnnnnnnnnnnnnnnnnnnnnnnnnnnnnnnnnnnnnnnnnnnnnnnnnnnnnnnnnnnnnnnnnnnnnnnnnnnnnnnnnnnnnnnnnnnnnnnnnnnnnnnnnnnnnnnnnnnnnnnnnnnnnnnnnnnnnnnnnnnnnnnnnnnnnnnnnnnnnnnnnnnnnnnnnnnnnnnnnnnnnnnnnnnnnnnnnnnnnnnnnnnnnnnnnnnnnnnnnnnnnnnnnnnnnnnnnnnnnnnnnnnnnnnnnnnnnnnnnnnnnnnnnnnnnnnnnnnnnnnnnnnnnnnnnnnnnnnnnnnnnnnnnnnnnnnnnnnnnnnnnnnnnnnnnnnnnnnnnnnnnnnnnnnnnnnnnnnnnnnnnnnnnnnnnnnnnnnnnnnnnnnnnnnnnnnnnnnnnnnnnnnnnnnnnnnnnnnnnnnnnnnnnnnnnnnnnnnnnnnnnnnnnnnnnnnnnnnnnnnnnnnnnnnnnnnnnnnnnnnnnnnnnnnnnnnnnnnnnnnnnnnnnnnnnnnnnnnnnnnnnnnnnnnnnnnnnnnnnnnnnnnnnnnnnnnnnnnnnnnnnnnnnnnnnnnnnnnnnnnnnnnnnnnnnnnnnnnnnnnnnnnnnnnnnnnnnnnnnnnnnnnnnnnnnnnnnnnnnnnnnnnnnnnnnnnnnnnnnnnnnnnnnnnnnnnnnnnnnnnnnnnnnnnnnnnnnnnnnnnnnnnnnnnnnnnnnnnnnnnnnnnnnnnnnnnnnnnnnnnnnnnnnnnnnnnnnnnnnnnnnnnnnnnnnnnnnnnnnnnnnnnnnnnnnnnnnnnnnnnnnnnnnnnnnnnnnnnnnnnnnnnnnnnnnnnnnnnnnnnnnnnnnnnnnnnnnnnnnnnnnnnnnnnnnnnnnnnnnnnnnnnnnnnnnnnnnnnnnnnnnnnnnnnnnnnnnnnnnnnnnnnnnnnnnnnnnnnnnnnnnnnnnnnnnnnnnnnnnnnnnnnnnnnnnnnnnnnnnnnnnnnnnnnnnnnnnnnnnnnnnnnnnnnnnnnnnnnnnnnnnnnnnnnnnnnnnnnnnnnnnnnnnnnnnnnnnnnnnnnnnnnnnnnnnnnnnnnnnnnnnnnnnnnnnnnnnnnnnnnnnnnnnnnnnnnnnnnnnnnnnnnnnnnnnnnnnnnnnnnnnnnnnnnnnnnnnnnnnnnnnnnnnnnnnnnnnnnnnnnnnnnnnnnnnnnnnnnnnnnnnnnnnnnnnnnnnnnnnnnnnnnnnnnnnnnnnnnnnnnnnnnnnnnnnnnnnnnnnnnnnnnnnnnnnnnnnnnnnnnnnnnnnnnnnnnnnnnnnnnnnnnnnnnnnnnnnnnnnnnnnnnnnnnnnnnnnnnnnnnnnnnnnnnnnnnnnnnnnnnnnnnnnnnnnnnnnnnnnnnnnnnnnnnnnnnnnnnnnnnnnnnnnnnnnnnnnnnnnnnnnnnnnnnnnnnnnnnnnnnnnnnnnnnnnnnnnnnnnnnnnnnnnnnnnnnnnnnnnnnnnnnnnnnnnnnnnnnnnnnnnnnnnnnnnnnnnnnnnnnnnnnnnnnnnnnnnnnnnnnnnnnnnnnnnnnnnnnnnnnnnnnnnnnnnnnnnnnnnnnnnnnnnnnnnnnnnnnnnnnnnnnnnnnnnnnnnnnnnnnnnnnnnnnnnnnnnnnnnnnnnnnnnnnnnnnnnnnnnnnnnnnnnnnnnnnnnnnnnnnnnnnnnnnnnnnnnnnnnnnnnnnnnnnnnnnnnnnnnnnnnnnnnnnnnnnnnnnnnnnnnnnnnnnnnnnnnnnnnnnnnnnnnnnnnnnnnnnnnnnnnnnnnnnnnnnnnnnnnnnnnnnnnnnnnnnnnnnnnnnnnnnnnnnnnnnnnnnnnnnnnnnnnnnnnnnnnnnnnnnnnnnnnnnnnnnnnnnnnnnnnnnnnnnnnnnnnnnnnnnnnnnnnnnnnnnnnnnnnnnnnnnnnnnnnnnnnnnnnnnnnnnnnnnnnnnnnnnnnnnnnnnnnnnnnnnnnnnnnnnnnnnnnnnnnnnnnnnnnnnnnnnnnnnnnnnnnnnnnnnnnnnnnnnnnnnnnnnnnnnnnnnnnnnnnnnnnnnnnnnnnnnnnnnnnnnnnnnnnnnnnnnnnnnnnnnnnnnnnnnnnnnnnnnnnnnnnnnnnnnnnnnnnnnnnnnnnnnnnnnnnnnnnnnnnnnnnnnnnnnnnnnnnnnnnnnnnnnnnnnnnnnnnnnnnnnnnnnnnnnnnnnnnnnnnnnnnnnnnnnnnnnnnnnnnnnnnnnnnnnnnnnnnnnnnnnnnnnnnnnnnnnnnnnnnnnnnnnnnnnnnnnnnnnnnnnnnnnnnnnnnnnnnnnnnnnnnnnnnnnnnnnnnnnnnnnnnnnnnnnnnnnnnnnnnnnnnnnnnnnnnnnnnnnnnnnnnnnnnnnnnnnnnnnnnnnnnnnnnnnnnnnnnnnnnnnnnnnnnnnnnnnnnnnnnnnnnnnnnnnnnnnnnnnnnnnnnnnnnnnnnnnnnnnnnnnnnnnnnnnnnnnnnnnnnnnnnnnnnnnnnnnnnnnnnnnnnnnnnnnnnnnnnnnnnnnnnnnnnnnnnnnnnnnnnnnnnnnnnnnnnnnnnnnnnnnnnnnnnnnnnnnnnnnnnnnnnnnnnnnnnnnnnnnnnnnnnnnnnnnnnnnnnnnnnnnnnnnnnnnnnnnnnnnnnnnnnnnnnnnnnnnnnnnnnnnnnnnnnnnnnnnnnnnnnnnnnnnnnnnnnnnnnnnnnnnnnnnnnnnnnnnnnnnnnnnnnnnnnnnnnnnnnnnnnnnnnnnnnnnnnnnnnnnnnnnnnnnnnnnnnnnnnnnnnnnnnnnnnnnnnnnnnnnnnnnnnnnnnnnnnnnnnnnnnnnnnnnnnnnnnnnnnnnnnnnnnnnnnnnnnnnnnnnnnnnnnnnnnnnnnnnnnnnnnnnnnnnnnnnnnnnnnnnnnnnnnnnnnnnnnnnnnnnnnnnnnnnnnnnnnnnnnnnnnnnnnnnnnnnnnnnnnnnnnnnnnnnnnnnnnnnnnnnnnnnnnnnnnnnnnnnnnnnnnnnnnnnnnnnnnnnnnnnnnnnnnnnnnnnnnnnnnnnnnnnnnnnnnnnnnnnnnnnnnnnnnnnnnnnnnnnnnnnnnnnnnnnnnnnnnnnnnnnnnnnnnnnnnnnnnnnnnnnnnnnnnnnnnnnnnnnnnnnnnnnnnnnnnnnnnnnnnnnnnnnnnnnnnnnnnnnnnnnnnnnnnnnnnnnnnnnnnnnnnnnnnnnnnnnnnnnnnnnnnnnnnnnnnnnnnnnnnnnnnnnnnnnnnnnnnnnnnnnnnnnnnnnnnnnnnnnnnnnnnnnnnnnnnnnnnnnnnnnnnnnnnnnnnnnnnnnnnnnnnnnnnnnnnnnnnnnnnnnnnnnnnnnnnnnnnnnnnnnnnnnnnnnnnnnnnnnnnnnnnnnnnnnnnnnnnnnnnnnnnnnnnnnnnnnnnnnnnnnnnnnnnnnnnnnnnnnnnnnnnnnnnnnnnnnnnnnnnnnnnnnnnnnnnnnnnnnnnnnnnnnnnnnnnnnnnnnnnnnnnnnnnnnnnnnnnnnnnnnnnnnnnnnnnnnnnnnnnnnnnnnnnnnnnnnnnnnnnnnnnnnnnnnnnnnnnnnnnnnnnnnnnnnnnnnnnnnnnnnnnnnnnnnnnnnnnnnnnnnnnnnnnnnnnnnnnnnnnnnnnnnnnnnnnnnnnnnnnnnnnnnnnnnnnnnnnnnnnnnnnnnnnnnnnnnnnnnnnnnnnnnnnnnnnnnnnnnnnnnnnnnnnnnnnnnnnnnnnnnnnnnnnnnnnnnnnnnnnnnnnnnnnnnnnnnnnnnnnnnnnnnnnnnnnnnnnnnnnnnnnnnnnnnnnnnnnnnnnnnnnnnnnnnnnnnnnnnnnnnnnnnnnnnnnnnnnnnnnnnnnnnnnnnnnnnnnnnnnnnnnnnnnnnnnnnnnnnnnnnnnnnnnnnnnnnnnnnnnnnnnnnnnnnnnnnnnnnnnnnnnnnnnnnnnnnnnnnnnnnnnnnnnnnnnnnnnnnnnnnnnnnnnnnnnnnnnnnnnnnnnnnnnnnnnnnnnnnnnnnnnnnnnnnnnnnnnnnnnnnnnnnnnnnnnnnnnnnnnnnnnnnnnnnnnnnnnnnnnnnnnnnnnnnnnnnnnnnnnnnnnnnnnnnnnnnnnnnnnnnnnnnnnnnnnnnnnnnnnnnnnnnnnnnnnnnnnnnnnnnnnnnnnnnnnnnnnnnnnnnnnnnnnnnnnnnnnnnnnnnnnnnnnnnnnnnnnnnnnnnnnnnnnnnnnnnnnnnnnnnnnnnnnnnnnnnnnnnnnnnnnnnnnnnnnnnnnnnnnnnnnnnnnnnnnnnnnnnnnnnnnnnnnnnnnnnnnnnnnnnnnnnnnnnnnnnnnnnnnnnnnnnnnnnnnnnnnnnnnnnnnnnnnnnnnnnnnnnnnnnnnnnnnnnnnnnnnnnnnnnnnnnnnnnnnnnnnnnnnnnnnnnnnnnnnnnnnnnnnnnnnnnnnnnnnnnnnnnnnnnnnnnnnnnnnnnnnnnnnnnnnnnnnnnnnnnnnnnnnnnnnnnnnnnnnnnnnnnnnnnnnnnnnnnnnnnnnnnnnnnnnnnnnnnnnnnnnnnnnnnnnnnnnnnnnnnnnnnnnnnnnnnnnnnnnnnnnnnnnnnnnnnnnnnnnnnnnnnnnnnnnnnnnnnnnnnnnnnnnnnnnnnnnnnnnnnnnnnnnnnnnnnnnnnnnnnnnnnnnnnnnnnnnnnnnnnnnnnnnnnnnnnnnnnnnnnnnnnnnnnnnnnnnnnnnnnnnnnnnnnnnnnnnnnnnnnnnnnnnnnnnnnnnnnnnnnnnnnnnnnnnnnnnnnnnnnnnnnnnnnnnnnnnnnnnnnnnnnnnnnnnnnnnnnnnnnnnnnnnnnnnnnnnnnnnnnnnnnnnnnnnnnnnnnnnnnnnnnnnnnnnnnnnnnnnnnnnnnnnnnnnnnnnnnnnnnnnnnnnnnnnnnnnnnnnnnnnnnnnnnnnnnnnnnnnnnnnnnnnnnnnnnnnnnnnnnnnnnnnnnnnnnnnnnnnnnnnnnnnnnnnnnnnnnnnnnnnnnnnnnnnnnnnnnnnnnnnnnnnnnnnnnnnnnnnnnnnnnnnnnnnnnnnnnnnnnnnnnnnnnnnnnnnnnnnnnnnnnnnnnnnnnnnnnnnnnnnnnnnnnnnnnnnnnnnnnnnnnnnnnnnnnnnnnnnnnnnnnnnnnnnnnnnnnnnnnnnnnnnnnnnnnnnnnnnnnnnnnnnnnnnnnnnnnnnnnnnnnnnnnnnnnnnnnnnnnnnnnnnnnnnnnnnnnnnnnnnnnnnnnnnnnnnnnnnnnnnnnnnnnnnnnnnnnnnnnnnnnnnnnnnnnnnnnnnnnnnnnnnnnnnnnnnnnnnnnnnnnnnnnnnnnnnnnnnnnnnnnnnnnnnnnnnnnnnnnnnnnnnnnnnnnnnnnnnnnnnnnnnnnnnnnnnnnnnnnnnnnnnnnnnnnnnnnnnnnnnnnnnnnnnnnnnnnnnnnnnnnnnnnnnnnnnnnnnnnnnnnnnnnnnnnnnnnnnnnnnnnnnnnnnnnnnnnnnnnnnnnnnnnnnnnnnnnnnnnnnnnnnnnnnnnnnnnnnnnnnnnnnnnnnnnnnnnnnnnnnnnnnnnnnnnnnnnnnnnnnnnnnnnnnnnnnnnnnnnnnnnnnnnnnnnnnnnnnnnnnnnnnnnnnnnnnnnnnnnnnnnnnnnnnnnnnnnnnnnnnnnnnnnnnnnnnnnnnnnnnnnnnnnnnnnnnnnnnnnnnnnnnnnnnnnnnnnnnnnnnnnnnnnnnnnnnnnnnnnnnnnnnnnnnnnnnnnnnnnnnnnnnnnnnnnnnnnnnnnnnnnnnnnnnnnnnnnnnnnnnnnnnnnnnnnnnnnnnnnnnnnnnnnnnnnnnnnnnnnnnnnnnnnnnnnnnnnnnnnnnnnnnnnnnnnnnnnnnnnnnnnnnnnnnnnnnnnnnnnnnnnnnnnnnnnnnnnnnnnnnnnnnnnnnnnnnnnnnnnnnnnnnnnnnnnnnnnnnnnnnnnnnnnnnnnnnnnnnnnnnnnnnnnnnnnnnnnnnnnnnnnnnnnnnnnnnnnnnnnnnnnnnnnnnnnnnnnnnnnnnnnnnnnnnnnnnnnnnnnnnnnnnnnnnnnnnnnnnnnnnnnnnnnnnnnnnnnnnnnnnnnnnnnnnnnnnnnnnnnnnnnnnnnnnnnnnnnnnnnnnnnnnnnnnnnnnnnnnnnnnnnnnnnnnnnnnnnnnnnnnnnnnnnnnnnnnnnnnnnnnnnnnnnnnnnnnnnnnnnnnnnnnnnnnnnnnnnnnnnnnnnnnnnnnnnnnnnnnnnnnnnnnnnnnnnnnnnnnnnnnnnnnnnnnnnnnnnnnnnnnnnnnnnnnnnnnnnnnnnnnnnnnnnnnnnnnnnnnnnnnnnnnnnnnnnnnnnnnnnnnnnnnnnnnnnnnnnnnnnnnnnnnnnnnnnnnnnnnnnnnnnnnnnnnnnnnnnnnnnnnnnnnnnnnnnnnnnnnnnnnnnnnnnnnnnnnnnnnnnnnnnnnnnnnnnnnnnnnnnnnnnnnnnnnnnnnnnnnnnnnnnnnnnnnnnnnnnnnnnnnnnnnnnnnnnnnnnnnnnnnnnnnnnnnnnnnnnnnnnnnnnnnnnnnnnnnnnnnnnnnnnnnnnnnnnnnnnnnnnnnnnnnnnnnnnnnnnnnnnnnnnnnnnnnnnnnnnnnnnnnnnnnnnnnnnnnnnnnnnnnnnnnnnnnnnnnnnnnnnnnnnnnnnnnnnnnnnnnnnnnnnnnnnnnnnnnnnnnnnnnnnnnnnnnnnnnnnnnnnnnnnnnnnnnnnnnnnnnnnnnnnnnnnnnnnnnnnnnnnnnnnnnnnnnnnnnnnnnnnnnnnnnnnnnnnnnnnnnnnnnnnnnnnnnnnnnnnnnnnnnnnnnnnnnnnnnnnnnnnnnnnnnnnnnnnnnnnnnnnnnnnnnnnnnnnnnnnnnnnnnnnnnnnnnnnnnnnnnnnnnnnnnnnnnnnnnnnnnnnnnnnnnnnnnnnnnnnnnnnnnnnnnnnnnnnnnnnnnnnnnnnnnnnnnnnnnnnnnnnnnnnnnnnnnnnnnnnnnnnnnnnnnnnnnnnnnnnnnnnnnnnnnnnnnnnnnnnnnnnnnnnnnnnnnnnnnnnnnnnnnnnnnnnnnnnnnnnnnnnnnnnnnnnnnnnnnnnnnnnnnnnnnnnnnnnnnnnnnnnnnnnnnnnnnnnnnnnnnnnnnnnnnnnnnnnnnnnnnnnnnnnnnnnnnnnnnnnnnnnnnnnnnnnnnnnnnnnnnnnnnnnnnnnnnnnnnnnnnnnnnnnnnnnnnnnnnnnnnnnnnnnnnnnnnnnnnnnnnnnnnnnnnnnnnnnnnnnnnnnnnnnnnnnnnnnnnnnnnnnnnnnnnnnnnnnnnnnnnnnnnnnnnnnnnnnnnnnnnnnnnnnnnnnnnnnnnnnnnnnnnnnnnnnnnnnnnnnnnnnnnnnnnnnnnnnnnnnnnnnnnnnnnnnnnnnnnnnnnnnnnnnnnnnnnnnnnnnnnnnnnnnnnnnnnnnnnnnnnnnnnnnnnnnnnnnnnnnnnnnnnnnnnnnnnnnnnnnnnnnnnnnnnnnnnnnnnnnnnnnnnnnnnnnnnnnnnnnnnnnnnnnnnnnnnnnnnnnnnnnnnnnnnnnnnnnnnnnnnnnnnnnnnnnnnnnnnnnnnnnnnnnnnnnnnnnnnnnnnnnnnnnnnnnnnnnnnnnnnnnnnnnnnnnnnnnnnnnnnnnnnnnnnnnnnnnnnnnnnnnnnnnnnnnnnnnnnnnnnnnnnnnnnnnnnnnnnnnnnnnnnnnnnnnnnnnnnnnnnnnnnnnnnnnnnnnnnnnnnnnnnnnnnnnnnnnnnnnnnnnnnnnnnnnnnnnnnnnnnnnnnnnnnnnnnnnnnnnnnnnnnnnnnnnnnnnnnnnnnnnnnnnnnnnnnnnnnnnnnnnnnnnnnnnnnnnnnnnnnnnnnnnnnnnnnnnnnnnnnnnnnnnnnnnnnnnnnnnnnnnnnnnnnnnnnnnnnnnnnnnnnnnnnnnnnnnnnnnnnnnnnnnnnnnnnnnnnnnnnnnnnnnnnnnnnnnnnnnnnnnnnnnnnnnnnnnnnnnnnnnnnnnnnnnnnnnnnnnnnnnnnnnnnnnnnnnnnnnnnnnnnnnnnnnnnnnnnnnnnnnnnnnnnnnnnnnnnnnnnnnnnnnnnnnnnnnnnnnnnnnnnnnnnnnnnnnnnnnnnnnnnnnnnnnnnnnnnnnnnnnnnnnnnnnnnnnnnnnnnnnnnnnnnnnnnnnnnnnnnnnnnnnnnnnnnnnnnnnnnnnnnnnnnnnnnnnnnnnnnnnnnnnnnnnnnnnnnnnnnnnnnnnnnnnnnnnnnnnnnnnnnnnnnnnnnnnnnnnnnnnnnnnnnnnnnnnnnnnnnnnnnnnnnnnnnnnnnnnnnnnnnnnnnnnnnnnnnnnnnnnnnnnnnnnnnnnnnnnnnnnnnnnnnnnnnnnnnnnnnnnnnnnnnnnnnnnnnnnnnnnnnnnnnnnnnnnnnnnnnnnnnnnnnnnnnnnnnnnnnnnnnnnnnnnnnnnnnnnnnnnnnnnnnnnnnnnnnnnnnnnnnnnnnnnnnnnnnnnnnnnnnnnnnnnnnnnnnnnnnnnnnnnnnnnnnnnnnnnnnnnnnnnnnnnnnnnnnnnnnnnnnnnnnnnnnnnnnnnnnnnnnnnnnnnnnnnnnnnnnnnnnnnnnnnnnnnnnnnnnnnnnnnnnnnnnnnnnnnnnnnnnnnnnnnnnnnnnnnnnnnnnnnnnnnnnnnnnnnnnnnnnnnnnnnnnnnnnnnnnnnnnnnnnnnnnnnnnnnnnnnnnnnnnnnnnnnnnnnnnnnnnnnnnnnnnnnnnnnnnnnnnnnnnnnnnnnnnnnnnnnnnnnnnnnnnnnnnnnnnnnnnnnnnnnnnnnnnnnnnnnnnnnnnnnnnnnnnnnnnnnnnnnnnnnnnnnnnnnnnnnnnnnnnnnnnnnnnnnnnnnnnnnnnnnnnnnnnnnnnnnnnnnnnnnnnnnnnnnnnnnnnnnnnnnnnnnnnnnnnnnnnnnnnnnnnnnnnnnnnnnnnnnnnnnnnnnnnnnnnnnnnnnnnnnnnnnnnnnnnnnnnnnnnnnnnnnnnnnnnnnnnnnnnnnnnnnnnnnnnnnnnnnnnnnnnnnnnnnnnnnnnnnnnnnnnnnnnnnnnnnnnnnnnnnnnnnnnnnnnnnnnnnnnnnnnnnnnnnnnnnnnnnnnnnnnnnnnnnnnnnnnnnnnnnnnnnnnnnnnnnnnnnnnnnnnnnnnnnnnnnnnnnnnnnnnnnnnnnnnnnnnnnnnnnnnnnnnnnnnnnnnnnnnnnnnnnnnnnnnnnnnnnnnnnnnnnnnnnnnnnnnnnnnnnnnnnnnnnnnnnnnnnnnnnnnnnnnnnnnnnnnnnnnnnnnnnnnnnnnnnnnnnnnnnnnnnnnnnnnnnnnnnnnnnnnnnnnnnnnnnnnnnnnnnnnnnnnnnnnnnnnnnnnnnnnnnnnnnnnnnnnnnnnnnnnnnnnnnnnnnnnnnnnnnnnnnnnnnnnnnnnnnnnnnnnnnnnnnnnnnnnnnnnnnnnnnnnnnnnnnnnnnnnnnnnnnnnnnnnnnnnnnnnnnnnnnnnnnnnnnnnnnnnnnnnnnnnnnnnnnnnnnnnnnnnnnnnnnnnnnnnnnnnnnnnnnnnnnnnnnnnnnnnnnnnnnnnnnnnnnnnnnnnnnnnnnnnnnnnnnnnnnnnnnnnnnnnnnnnnnnnnnnnnnnnnnnnnnnnnnnnnnnnnnnnnnnnnnnnnnnnnnnnnnnnnnnnnnnnnnnnnnnnnnnnnnnnnnnnnnnnnnnnnnnnnnnnnnnnnnnnnnnnnnnnnnnnnnnnnnnnnnnnnnnnnnnnnnnnnnnnnnnnnnnnnnnnnnnnnnnnnnnnnnnnnnnnnnnnnnnnnnnnnnnnnnnnnnnnnnnnnnnnnnnnnnnnnnnnnnnnnnnnnnnnnnnnnnnnnnnnnnnnnnnnnnnnnnnnnnnnnnnnnnnnnnnnnnnnnnnnnnnnnnnnnnnnnnnnnnnnnnnnnnnnnnnnnnnnnnnnnnnnnnnnnnnnnnnnnnnnnnnnnnnnnnnnnnnnnnnnnnnnnnnnnnnnnnnnnnnnnnnnnnnnnnnnnnnnnnnnnnnnnnnnnnnnnnnnnnnnnnnnnnnnnnnnnnnnnnnnnnnnnnnnnnnnnnnnnnnnnnnnnnnnnnnnnnnnnnnnnnnnnnnnnnnnnnnnnnnnnnnnnnnnnnnnnnnnnnnnnnnnnnnnnnnnnnnnnnnnnnnnnnnnnnnnnnnnnnnnnnnnnnnnnnnnnnnnnnnnnnnnnnnnnnnnnnnnnnnnnnnnnnnnnnnnnnnnnnnnnnnnnnnnnnnnnnnnnnnnnnnnnnnnnnnnnnnnnnnnnnnnnnnnnnnnnnnnnnnnnnnnnnnnnnnnnnnnnnnnnnnnnnnnnnnnnnnnnnnnnnnnnnnnnnnnnnnnnnnnnnnnnnnnnnnnnnnnnnnnnnnnnnnnnnnnnnnnnnnnnnnnnnnnnnnnnnnnnnnnnnnnnnnnnnnnnnnnnnnnnnnnnnnnnnnnnnnnnnnnnnnnnnnnnnnnnnnnnnnnnnnnnnnnnnnnnnnnnnnnnnnnnnnnnnnnnnnnnnnnnnnnnnnnnnnnnnnnnnnnnnnnnnnnnnnnnnnnnnnnnnnnnnnnnnnnnnnnnnnnnnnnnnnnnnnnnnnnnnnnnnnnnnnnnnnnnnnnnnnnnnnnnnnnnnnnnnnnnnnnnnnnnnnnnnnnnnnnnnnnnnnnnnnnnnnnnnnnnnnnnnnnnnnnnnnnnnnnnnnnnnnnnnnnnnnnnnnnnnnnnnnnnnnnnnnnnnnnnnnnnnnnnnnnnnnnnnnnnnnnnnnnnnnnnnnnnnnnnnnnnnnnnnnnnnnnnnnnnnnnnnnnnnnnnnnnnnnnnnnnnnnnnnnnnnnnnnnnnnnnnnnnnnnnnnnnnnnnnnnnnnnnnnnnnnnnnnnnnnnnnnnnnnnnnnnnnnnnnnnnnnnnnnnnnnnnnnnnnnnnnnnnnnnnnnnnnnnnnnnnnnnnnnnnnnnnnnnnnnnnnnnnnnnnnnnnnnnnnnnnnnnnnnnnnnnnnnnnnnnnnnnnnnnnnnnnnnnnnnnnnnnnnnnnnnnnnnnnnnnnnnnnnnnnnnnnnnnnnnnnnnnnnnnnnnnnnnnnnnnnnnnnnnnnnnnnnnnnnnnnnnnnnnnnnnnnnnnnnnnnnnnnnnnnnnnnnnnnnnnnnnnnnnnnnnnnnnnnnnnnnnnnnnnnnnnnnnnnnnnnnnnnnnnnnnnnnnnnnnnnnnnnnnnnnnnnnnnnnnnnnnnnnnnnnnnnnnnnnnnnnnnnnnnnnnnnnnnnnnnnnnnnnnnnnnnnnnnnnnnnnnnnnnnnnnnnnnnnnnnnnnnnnnnnnnnnnnnnnnnnnnnnnnnnnnnnnnnnnnnnnnnnnnnnnnnnnnnnnnnnnnnnnnnnnnnnnnnnnnnnnnnnnnnnnnnnnnnnnnnnnnnnnnnnnnnnnnnnnnnnnnnnnnnnnnnnnnnnnnnnnnnnnnnnnnnnnnnnnnnnnnnnnnnnnnnnnnnnnnnnnnnnnnnnnnnnnnnnnnnnnnnnnnnnnnnnnnnnnnnnnnnnnnnnnnnnnnnnnnnnnnnnnnnnnnnnnnnnnnnnnnnnnnnnnnnnnnnnnnnnnnnnnnnnnnnnnnnnnnnnnnnnnnnnnnnnnnnnnnnnnnnnnnnnnnnnnnnnnnnnnnnnnnnnnnnnnnnnnnnnnnnnnnnnnnnnnnnnnnnnnnnnnnnnnnnnnnnnnnnnnnnnnnnnnnnnnnnnnnnnnnnnnnnnnnnnnnnnnnnnnnnnnnnnnnnnnnnnnnnnnnnnnnnnnnnnnnnnnnnnnnnnnnnnnnnnnnnnnnnnnnnnnnnnnnnnnnnnnnnnnnnnnnnnnnnnnnnnnnnnnnnnnnnnnnnnnnnnnnnnnnnnnnnnnnnnnnnnnnnnnnnnnnnnnnnnnnnnnnnnnnnnnnnnnnnnnnnnnnnnnnnnnnnnnnnnnnnnnnnnnnnnnnnnnnnnnnnnnnnnnnnnnnnnnnnnnnnnnnnnnnnnnnnnnnnnnnnnnnnnnnnnnnnnnnnnnnnnnnnnnnnnnnnnnnnnnnnnnnnnnnnnnnnnnnnnnnnnnnnnnnnnnnnnnnnnnnnnnnnnnnnnnnnnnnnnnnnnnnnnnnnnnnnnnnnnnnnnnnnnnnnnnnnnnnnnnnnnnnnnnnnnnnnnnnnnnnnnnnnnnnnnnnnnnnnnnnnnnnnnnnnnnnnnnnnnnnnnnnnnnnnnnnnnnnnnnnnnnnnnnnnnnnnnnnnnnnnnnnnnnnnnnnnnnnnnnnnnnnnnnnnnnnnnnnnnnnnnnnnnnnnnnnnnnnnnnnnnnnnnnnnnnnnnnnnnnnnnnnnnnnnnnnnnnnnnnnnnnnnnnnnnnnnnnnnnnnnnnnnnnnnnnnnnnnnnnnnnnnnnnnnnnnnnnnnnnnnnnnnnnnnnnnnnnnnnnnnnnnnnnnnnnnnnnnnnnnnnnnnnnnnnnnnnnnnnnnnnnnnnnnnnnnnnnnnnnnnnnnnnnnnnnnnnnnnnnnnnnnnnnnnnnnnnnnnnnnnnnnnnnnnnnnnnnnnnnnnnnnnnnnnnnnnnnnnnnnnnnnnnnnnnnnnnnnnnnnnnnnnnnnnnnnnnnnnnnnnnnnnnnnnnnnnnnnnnnnnnnnnnnnnnnnnnnnnnnnnnnnnnnnnnnnnnnnnnnnnnnnnnnnnnnnnnnnnnnnnnnnnnnnnnnnnnnnnnnnnnnnnnnnnnnnnnnnnnnnnnnnnnnnnnnnnnnnnnnnnnnnnnnnnnnnnnnnnnnnnnnnnnnnnnnnnnnnnnnnnnnnnnnnnnnnnnnnnnnnnnnnnnnnnnnnnnnnnnnnnnnnnnnnnnnnnnnnnnnnnnnnnnnnnnnnnnnnnnnnnnnnnnnnnnnnnnnnnnnnnnnnnnnnnnnnnnnnnnnnnnnnnnnnnnnnnnnnnnnnnnnnnnnnnnnnnnnnnnnnnnnnnnnnnnnnnnnnnnnnnnnnnnnnnnnnnnnnnnnnnnnnnnnnnnnnnnnnnnnnnnnnnnnnnnnnnnnnnnnnnnnnnnnnnnnnnnnnnnnnnnnnnnnnnnnnnnnnnnnnnnnnnnnnnnnnnnnnnnnnnnnnnnnnnnnnnnnnnnnnnnnnnnnnnnnnnnnnnnnnnnnnnnnnnnnnnnnnnnnnnnnnnnnnnnnnnnnnnnnnnnnnnnnnnnnnnnnnnnnnnnnnnnnnnnnnnnnnnnnnnnnnnnnnnnnnnnnnnnnnnnnnnnnnnnnnnnnnnnnnnnnnnnnnnnnnnnnnnnnnnnnnnnnnnnnnnnnnnnnnnnnnnnnnnnnnnnnnnnnnnnnnnnnnnnnnnnnnnnnnnnnnnnnnnnnnnnnnnnnnnnnnnnnnnnnnnnnnnnnnnnnnnnnnnnnnnnnnnnnnnnnnnnnnnnnnnnnnnnnnnnnnnnnnnnnnnnnnnnnnnnnnnnnnnnnnnnnnnnnnnnnnnnnnnnnnnnnnnnnnnnnnnnnnnnnnnnnnnnnnnnnnnnnnnnnnnnnnnnnnnnnnnnnnnnnnnnnnnnnnnnnnnnnnnnnnnnnnnnnnnnnnnnnnnnnnnnnnnnnnnnnnnnnnnnnnnnnnnnnnnnnnnnnnnnnnnnnnnnnnnnnnnnnnnnnnnnnnnnnnnnnnnnnnnnnnnnnnnnnnnnnnnnnnnnnnnnnnnnnnnnnnnnnnnnnnnnnnnnnnnnnnnnnnnnnnnnnnnnnnnnnnnnnnnnnnnnnnnnnnnnnnnnnnnnnnnnnnnnnnnnnnnnnnnnnnnnnnnnnnnnnnnnnnnnnnnnnnnnnnnnnnnnnnnnnnnnnnnnnnnnnnnnnnnnnnnnnnnnnnnnnnnnnnnnnnnnnnnnnnnnnnnnnnnnnnnnnnnnnnnnnnnnnnnnnnnnnnnnnnnnnnnnnnnnnnnnnnnnnnnnnnnnnnnnnnnnnnnnnnnnnnnnnnnnnnnnnnnnnnnnnnnnnnnnnnnnnnnnnnnnnnnnnnnnnnnnnnnnnnnnnnnnnnnnnnnnnnnnnnnnnnnnnnnnnnnnnnnnnnnnnnnnnnnnnnnnnnnnnnnnnnnnnnnnnnnnnnnnnnnnnnnnnnnnnnnnnnnnnnnnnnnnnnnnnnnnnnnnnnnnnnnnnnnnnnnnnnnnnnnnnnnnnnnnnnnnnnnnnnnnnnnnnnnnnnnnnnnnnnnnnnnnnnnnnnnnnnnnnnnnnnnnnnnnnnnnnnnnnnnnnnnnnnnnnnnnnnnnnnnnnnnnnnnnnnnnnnnnnnnnnnnnnnnnnnnnnnnnnnnnnnnnnnnnnnnnnnnnnnnnnnnnnnnnnnnnnnnnnnnnnnnnnnnnnnnnnnnnnnnnnnnnnnnnnnnnnnnnnnnnnnnnnnnnnnnnnnnnnnnnnnnnnnnnnnnnnnnnnnnnnnnnnnnnnnnnnnnnnnnnnnnnnnnnnnnnnnnnnnnnnnnnnnnnnnnnnnnnnnnnnnnnnnnnnnnnnnnnnnnnnnnnnnnnnnnnnnnnnnnnnnnnnnnnnnnnnnnnnnnnnnnnnnnnnnnnnnnnnnnnnnnnnnnnnnnnnnnnnnnnnnnnnnnnnnnnnnnnnnnnnnnnnnnnnnnnnnnnnnnnnnnnnnnnnnnnnnnnnnnnnnnnnnnnnnnnnnnnnnnnnnnnnnnnnnnnnnnnnnnnnnnnnnnnnnnnnnnnnnnnnnnnnnnnnnnnnnnnnnnnnnnnnnnnnnnnnnnnnnnnnnnnnnnnnnnnnnnnnnnnnnnnnnnnnnnnnnnnnnnnnnnnnnnnnnnnnnnnnnnnnnnnnnnnnnnnnnnnnnnnnnnnnnnnnnnnnnnnnnnnnnnnnnnnnnnnnnnnnnnnnnnnnnnnnnnnnnnnnnnnnnnnnnnnnnnnnnnnnnnnnnnnnnnnnnnnnnnnnnnnnnnnnnnnnnnnnnnnnnnnnnnnnnnnnnnnnnnnnnnnnnnnnnnnnnnnnnnnnnnnnnnnnnnnnnnnnnnnnnnnnnnnnnnnnnnnnnnnnnnnnnnnnnnnnnnnnnnnnnnnnnnnnnnnnnnnnnnnnnnnnnnnnnnnnnnnnnnnnnnnnnnnnnnnnnnnnnnnnnnnnnnnnnnnnnnnnnnnnnnnnnnnnnnnnnnnnnnnnnnnnnnnnnnnnnnnnnnnnnnnnnnnnnnnnnnnnnnnnnnnnnnnnnnnnnnnnnnnnnnnnnnnnnnnnnnnnnnnnnnnnnnnnnnnnnnnnnnnnnnnnnnnnnnnnnnnnnnnnnnnnnnnnnnnnnnnnnnnnnnnnnnnnnnnnnnnnnnnnnnnnnnnnnnnnnnnnnnnnnnnnnnnnnnnnnnnnnnnnnnnnnnnnnnnnnnnnnnnnnnnnnnnnnnnnnnnnnnnnnnnnnnnnnnnnnnnnnnnnnnnnnnnnnnnnnnnnnnnnnnnnnnnnnnnnnnnnnnnnnnnnnnnnnnnnnnnnnnnnnnnnnnnnnnnnnnnnnnnnnnnnnnnnnnnnnnnnnnnnnnnnnnnnnnnnnnnnnnnnnnnnnnnnnnnnnnnnnnnnnnnnnnnnnnnnnnnnnnnnnnnnnnnnnnnnnnnnnnnnnnnnnnnnnnnnnnnnnnnnnnnnnnnnnnnnnnnnnnnnnnnnnnnnnnnnnnnnnnnnnnnnnnnnnnnnnnnnnnnnnnnnnnnnnnnnnnnnnnnnnnnnnnnnnnnnnnnnnnnnnnnnnnnnnnnnnnnnnnnnnnnnnnnnnnnnnnnnnnnnnnnnnnnnnnnnnnnnnnnnnnnnnnnnnnnnnnnnnnnnnnnnnnnnnnnnnnnnnnnnnnnnnnnnnnnnnnnnnnnnnnnnnnnnnnnnnnnnnnnnnnnnnnnnnnnnnnnnnnnnnnnnnnnnnnnnnnnnnnnnnnnnnnnnnnnnnnnnnnnnnnnnnnnnnnnnnnnnnnnnnnnnnnnnnnnnnnnnnnnnnnnnnnnnnnnnnnnnnnnnnnnnnnnnnnnnnnnnnnnnnnnnnnnnnnnnnnnnnnnnnnnnnnnnnnnnnnnnnnnnnnnnnnnnnnnnnnnnnnnnnnnnnnnnnnnnnnnnnnnnnnnnnnnnnnnnnnnnnnnnnnnnnnnnnnnnnnnnnnnnnnnnnnnnnnnnnnnnnnnnnnnnnnnnnnnnnnnnnnnnnnnnnnnnnnnnnnnnnnnnnnnnnnnnnnnnnnnnnnnnnnnnnnnnnnnnnnnnnnnnnnnnnnnnnnnnnnnnnnnnnnnnnnnnnnnnnnnnnnnnnnnnnnnnnnnnnnnnnnnnnnnnnnnnnnnnnnnnnnnnnnnnnnnnnnnnnnnnnnnnnnnnnnnnnnnnnnnnnnnnnnnnnnnnnnnnnnnnnnnnnnnnnnnnnnnnnnnnnnnnnnnnnnnnnnnnnnnnnnnnnnnnnnnnnnnnnnnnnnnnnnnnnnnnnnnnnnnnnnnnnnnnnnnnnnnnnnnnnnnnnnnnnnnnnnnnnnnnnnnnnnnnnnnnnnnnnnnnnnnnnnnnnnnnnnnnnnnnnnnnnnnnnnnnnnnnnnnnnnnnnnnnnnnnnnnnnnnnnnnnnnnnnnnnnnnnnnnnnnnnnnnnnnnnnnnnnnnnnnnnnnnnnnnnnnnnnnnnnnnnnnnnnnnnnnnnnnnnnnnnnnnnnnnnnnnnnnnnnnnnnnnnnnnnnnnnnnnnnnnnnnnnnnnnnnnnnnnnnnnnnnnnnnnnnnnnnnnnnnnnnnnnnnnnnnnnnnnnnnnnnnnnnnnnnnnnnnnnnnnnnnnnnnnnnnnnnnnnnnnnnnnnnnnnnnnnnnnnnnnnnnnnnnnnnnnnnnnnnnnnnnnnnnnnnnnnnnnnnnnnnnnnnnnnnnnnnnnnnnnnnnnnnnnnnnnnnnnnnnnnnnnnnnnnnnnnnnnnnnnnnnnnnnnnnnnnnnnnnnnnnnnnnnnnnnnnnnnnnnnnnnnnnnnnnnnnnnnnnnnnnnnnnnnnnnnnnnnnnnnnnnnnnnnnnnnnnnnnnnnnnnnnnnnnnnnnnnnnnnnnnnnnnnnnnnnnnnnnnnnnnnnnnnnnnnnnnnnnnnnnnnnnnnnnnnnnnnnnnnnnnnnnnnnnnnnnnnnnnnnnnnnnnnnnnnnnnnnnnnnnnnnnnnnnnnnnnnnnnnnnnnnnnnnnnnnnnnnnnnnnnnnnnnnnnnnnnnnnnnnnnnnnnnnnnnnnnnnnnnnnnnnnnnnnnnnnnnnnnnnnnnnnnnnnnnnnnnnnnnnnnnnnnnnnnnnnnnnnnnnnnnnnnnnnnnnnnnnnnnnnnnnnnnnnnnnnnnnnnnnnnnnnnnnnnnnnnnnnnnnnnnnnnnnnnnnnnnnnnnnnnnnnnnnnnnnnnnnnnnnnnnnnnnnnnnnnnnnnnnnnnnnnnnnnnnnnnnnnnnnnnnnnnnnnnnnnnnnnnnnnnnnnnnnnnnnnnnnnnnnnnnnnnnnnnnnnnnnnnnnnnnnnnnnnnnnnnnnnnnnnnnnnnnnnnnnnnnnnnnnnnnnnnnnnnnnnnnnnnnnnnnnnnnnnnnnnnnnnnnnnnnnnnnnnnnnnnnnnnnnnnnnnnnnnnnnnnnnnnnnnnnnnnnnnnnnnnnnnnnnnnnnnnnnnnnnnnnnnnnnnnnnnnnnnnnnnnnnnnnnnnnnnnnnnnnnnnnnnnnnnnnnnnnnnnnnnnnnnnnnnnnnnnnnnnnnnnnnnnnnnnnnnnnnnnnnnnnnnnnnnnnnnnnnnnnnnnnnnnnnnnnnnnnnnnnnnnnnnnnnnnnnnnnnnnnnnnnnnnnnnnnnnnnnnnnnnnnnnnnnnnnnnnnnnnnnnnnnnnnnnnnnnnnnnnnnnnnnnnnnnnnnnnnnnnnnnnnnnnnnnnnnnnnnnnnnnnnnnnnnnnnnnnnnnnnnnnnnnnnnnnnnnnnnnnnnnnnnnnnnnnnnnnnnnnnnnnnnnnnnnnnnnnnnnnnnnnnnnnnnnnnnnnnnnnnnnnnnnnnnnnnnnnnnnnnnnnnnnnnnnnnnnnnnnnnnnnnnnnnnnnnnnnnnnnnnnnnnnnnnnnnnnnnnnnnnnnnnnnnnnnnnnnnnnnnnnnnnnnnnnnnnnnnnnnnnnnnnnnnnnnnnnnnnnnnnnnnnnnnnnnnnnnnnnnnnnnnnnnnnnnnnnnnnnnnnnnnnnnnnnnnnnnnnnnnnnnnnnnnnnnnnnnnnnnnnnnnnnnnnnnnnnnnnnnnnnnnnnnnnnnnnnnnnnnnnnnnnnnnnnnnnnnnnnnnnnnnnnnnnnnnnnnnnnnnnnnnnnnnnnnnnnnnnnnnnnnnnnnnnnnnnnnnnnnnnnnnnnnnnnnnnnnnnnnnnnnnnnnnnnnnnnnnnnnnnnnnnnnnnnnnnnnnnnnnnnnnnnnnnnnnnnnnnnnnnnnnnnnnnnnnnnnnnnnnnnnnnnnnnnnnnnnnnnnnnnnnnnnnnnnnnnnnnnnnnnnnnnnnnnnnnnnnnnnnnnnnnnnnnnnnnnnnnnnnnnnnnnnnnnnnnnnnnnnnnnnnnnnnnnnnnnnnnnnnnnnnnnnnnnnnnnnnnnnnnnnnnnnnnnnnnnnnnnnnnnnnnnnnnnnnnnnnnnnnnnnnnnnnnnnnnnnnnnnnnnnnnnnnnnnnnnnnnnnnnnnnnnnnnnnnnnnnnnnnnnnnnnnnnnnnnnnnnnnnnnnnnnnnnnnnnnnnnnnnnnnnnnnnnnnnnnnnnnnnnnnnnnnnnnnnnnnnnnnnnnnnnnnnnnnnnnnnnnnnnnnnnnnnnnnnnnnnnnnnnnnnnnnnnnnnnnnnnnnnnnnnnnnnnnnnnnnnnnnnnnnnnnnnnnnnnnnnnnnnnnnnnnnnnnnnnnnnnnnnnnnnnnnnnnnnnnnnnnnnnnnnnnnnnnnnnnnnnnnnnnnnnnnnnnnnnnnnnnnnnnnnnnnnnnnnnnnnnnnnnnnnnnnnnnnnnnnnnnnnnnnnnnnnnnnnnnnnnnnnnnnnnnnnnnnnnnnnnnnnnnnnnnnnnnnnnnnnnnnnnnnnnnnnnnnnnnnnnnnnnnnnnnnnnnnnnnnnnnnnnnnnnnnnnnnnnnnnnnnnnnnnnnnnnnnnnnnnnnnnnnnnnnnnnnnnnnnnnnnnnnnnnnnnnnnnnnnnnnnnnnnnnnnnnnnnnnnnnnnnnnnnnnnnnnnnnnnnnnnnnnnnnnnnnnnnnnnnnnnnnnnnnnnnnnnnnnnnnnnnnnnnnnnnnnnnnnnnnnnnnnnnnnnnnnnnnnnnnnnnnnnnnnnnnnnnnnnnnnnnnnnnnnnnnnnnnnnnnnnnnnnnnnnnnnnnnnnnnnnnnnnnnnnnnnnnnnnnnnnnnnnnnnnnnnnnnnnnnnnnnnnnnnnnnnnnnnnnnnnnnnnnnnnnnnnnnnnnnnnnnnnnnnnnnnnnnnnnnnnnnnnnnnnnnnnnnnnnnnnnnnnnnnnnnnnnnnnnnnnnnnnnnnnnnnnnnnnnnnnnnnnnnnnnnnnnnnnnnnnnnnnnnnnnnnnnnnnnnnnnnnnnnnnnnnnnnnnnnnnnnnnnnnnnnnnnnnnnnnnnnnnnnnnnnnnnnnnnnnnnnnnnnnnnnnnnnnnnnnnnnnnnnnnnnnnnnnnnnnnnnnnnnnnnnnnnnnnnnnnnnnnnnnnnnnnnnnnnnnnnnnnnnnnnnnnnnnnnnnnnnnnnnnnnnnnnnnnnnnnnnnnnnnnnnnnnnnnnnnnnnnnnnnnnnnnnnnnnnnnnnnnnnnnnnnnnnnnnnnnnnnnnnnnnnnnnnnnnnnnnnnnnnnnnnnnnnnnnnnnnnnnnnnnnnnnnnnnnnnnnnnnnnnnnnnnnnnnnnnnnnnnnnnnnnnnnnnnnnnnnnnnnnnnnnnnnnnnnnnnnnnnnnnnnnnnnnnnnnnnnnnnnnnnnnnnnnnnnnnnnnnnnnnnnnnnnnnnnnnnnnnnnnnnnnnnnnnnnnnnnnnnnnnnnnnnnnnnnnnnnnnnnnnnnnnnnnnnnnnnnnnnnnnnnnnnnnnnnnnnnnnnnnnnnnnnnnnnnnnnnnnnnnnnnnnnnnnnnnnnnnnnnnnnnnnnnnnnnnnnnnnnnnnnnnnnnnnnnnnnnnnnnnnnnnnnnnnnnnnnnnnnnnnnnnnnnnnnnnnnnnnnnnnnnnnnnnnnnnnnnnnnnnnnnnnnnnnnnnnnnnnnnnnnnnnnnnnnnnnnnnnnnnnnnnnnnnnnnnnnnnnnnnnnnnnnnnnnnnnnnnnnnnnnnnnnnnnnnnnnnnnnnnnnnnnnnnnnnnnnnnnnnnnnnnnnnnnnnnnnnnnnnnnnnnnnnnnnnnnnnnnnnnnnnnnnnnnnnnnnnnnnnnnnnnnnnnnnnnnnnnnnnnnnnnnnnnnnnnnnnnnnnnnnnnnnnnnnnnnnnnnnnnnnnnnnnnnnnnnnnnnnnnnnnnnnnnnnnnnnnnnnnnnnnnnnnnnnnnnnnnnnnnnnnnnnnnnnnnnnnnnnnnnnnnnnnnnnnnnnnnnnnnnnnnnnnnnnnnnnnnnnnnnnnnnnnnnnnnnnnnnnnnnnnnnnnnnnnnnnnnnnnnnnnnnnnnnnnnnnnnnnnnnnnnnnnnnnnnnnnnnnnnnnnnnnnnnnnnnnnnnnnnnnnnnnnnnnnnnnnnnnnnnnnnnnnnnnnnnnnnnnnnnnnnnnnnnnnnnnnnnnnnnnnnnnnnnnnnnnnnnnnnnnnnnnnnnnnnnnnnnnnnnnnnnnnnnnnnnnnnnnnnnnnnnnnnnnnnnnnnnnnnnnnnnnnnnnnnnnnnnnnnnnnnnnnnnnnnnnnnnnnnnnnnnnnnnnnnnnnnnnnnnnnnnnnnnnnnnnnnnnnnnnnnnnnnnnnnnnnnnnnnnnnnnnnnnnnnnnnnnnnnnnnnnnnnnnnnnnnnnnnnnnnnnnnnnnnnnnnnnnnnnnnnnnnnnnnnnnnnnnnnnnnnnnnnnnnnnnnnnnnnnnnnnnnnnnnnnnnnnnnnnnnnnnnnnnnnnnnnnnnnnnnnnnnnnnnnnnnnnnnnnnnnnnnnnnnnnnnnnnnnnnnnnnnnnnnnnnnnnnnnnnnnnnnnnnnnnnnnnnnnnnnnnnnnnnnnnnnnnnnnnnnnnnnnnnnnnnnnnnnnnnnnnnnnnnnnnnnnnnnnnnnnnnnnnnnnnnnnnnnnnnnnnnnnnnnnnnnnnnnnnnnnnnnnnnnnnnnnnnnnnnnnnnnnnnnnnnnnnnnnnnnnnnnnnnnnnnnnnnnnnnnnnnnnnnnnnnnnnnnnnnnnnnnnnnnnnnnnnnnnnnnnnnnnnnnnnnnnnnnnnnnnnnnnnnnnnnnnnnnnnnnnnnnnnnnnnnnnnnnnnnnnnnnnnnnnnnnnnnnnnnnnnnnnnnnnnnnnnnnnnnnnnnnnnnnnnnnnnnnnnnnnnnnnnnnnnnnnnnnnnnnnnnnnnnnnnnnnnnnnnnnnnnnnnnnnnnnnnnnnnnnnnnnnnnnnnnnnnnnnnnnnnnnnnnnnnnnnnnnnnnnnnnnnnnnnnnnnnnnnnnnnnnnnnnnnnnnnnnnnnnnnnnnnnnnnnnnnnnnnnnnnnnnnnnnnnnnnnnnnnnnnnnnnnnnnnnnnnnnnnnnnnnnnnnnnnnnnnnnnnnnnnnnnnnnnnnnnnnnnnnnnnnnnnnnnnnnnnnnnnnnnnnnnnnnnnnnnnnnnnnnnnnnnnnnnnnnnnnnnnnnnnnnnnnnnnnnnnnnnnnnnnnnnnnnnnnnnnnnnnnnnnnnnnnnnnnnnnnnnnnnnnnnnnnnnnnnnnnnnnnnnnnnnnnnnnnnnnnnnnnnnnnnnnnnnnnnnnnnnnnnnnnnnnnnnnnnnnnnnnnnnnnnnnnnnnnnnnnnnnnnnnnnnnnnnnnnnnnnnnnnnnnnnnnnnnnnnnnnnnnnnnnnnnnnnnnnnnnnnnnnnnnnnnnnnnnnnnnnnnnnnnnnnnnnnnnnnnnnnnnnnnnnnnnnnnnnnnnnnnnnnnnnnnnnnnnnnnnnnnnnnnnnnnnnnnnnnnnnnnnnnnnnnnnnnnnnnnnnnnnnnnnnnnnnnnnnnnnnnnnnnnnnnnnnnnnnnnnnnnnnnnnnnnnnnnnnnnnnnnnnnnnnnnnnnnnnnnnnnnnnnnnnnnnnnnnnnnnnnnnnnnnnnnnnnnnnnnnnnnnnnnnnnnnnnnnnnnnnnnnnnnnnnnnnnnnnnnnnnnnnnnnnnnnnnnnnnnnnnnnnnnnnnnnnnnnnnnnnnnnnnnnnnnnnnnnnnnnnnnnnnnnnnnnnnnnnnnnnnnnnnnnnnnnnnnnnnnnnnnnnnnnnnnnnnnnnnnnnnnnnnnnnnnnnnnnnnnnnnnnnnnnnnnnnnnnnnnnnnnnnnnnnnnnnnnnnnnnnnnnnnnnnnnnnnnnnnnnnnnnnnnnnnnnnnnnnnnnnnnnnnnnnnnnnnnnnnnnnnnnnnnnnnnnnnnnnnnnnnnnnnnnnnnnnnnnnnnnnnnnnnnnnnnnnnnnnnnnnnnnnnnnnnnnnnnnnnnnnnnnnnnnnnnnnnnnnnnnnnnnnnnnnnnnnnnnnnnnnnnnnnnnnnnnnnnnnnnnnnnnnnnnnnnnnnnnnnnnnnnnnnnnnnnnnnnnnnnnnnnnnnnnnnnnnnnnnnnnnnnnnnnnnnnnnnnnnnnnnnnnnnnnnnnnnnnnnnnnnnnnnnnnnnnnnnnnnnnnnnnnnnnnnnnnnnnnnnnnnnnnnnnnnnnnnnnnnnnnnnnnnnnnnnnnnnnnnnnnnnnnnnnnnnnnnnnnnnnnnnnnnnnnnnnnnnnnnnnnnnnnnnnnnnnnnnnnnnnnnnnnnnnnnnnnnnnnnnnnnnnnnnnnnnnnnnnnnnnnnnnnnnnnnnnnnnnnnnnnnnnnnnnnnnnnnnnnnnnnnnnnnnnnnnnnnnnnnnnnnnnnnnnnnnnnnnnnnnnnnnnnnnnnnnnnnnnnnnnnnnnnnnnnnnnnnnnnnnnnnnnnnnnnnnnnnnnnnnnnnnnnnnnnnnnnnnnnnnnnnnnnnnnnnnnnnnnnnnnnnnnnnnnnnnnnnnnnnnnnnnnnnnnnnnnnnnnnnnnnnnnnnnnnnnnnnnnnnnnnnnnnnnnnnnnnnnnnnnnnnnnnnnnnnnnnnnnnnnnnnnnnnnnnnnnnnnnnnnnnnnnnnnnnnnnnnnnnnnnnnnnnnnnnnnnnnnnnnnnnnnnnnnnnnnnnnnnnnnnnnnnnnnnnnnnnnnnnnnnnnnnnnnnnnnnnnnnnnnnnnnnnnnnnnnnnnnnnnnnnnnnnnnnnnnnnnnnnnnnnnnnnnnnnnnnnnnnnnnnnnnnnnnnnnnnnnnnnnnnnnnnnnnnnnnnnnnnnnnnnnnnnnnnnnnnnnnnnnnnnnnnnnnnnnnnnnnnnnnnnnnnnnnnnnnnnnnnnnnnnnnnnnnnnnnnnnnnnnnnnnnnnnnnnnnnnnnnnnnnnnnnnnnnnnnnnnnnnnnnnnnnnnnnnnnnnnnnnnnnnnnnnnnnnnnnnnnnnnnnnnnnnnnnnnnnnnnnnnnnnnnnnnnnnnnnnnnnnnnnnnnnnnnnnnnnnnnnnnnnnnnnnnnnnnnnnnnnnnnnnnnnnnnnnnnnnnnnnnnnnnnnnnnnnnnnnnnnnnnnnnnnnnnnnnnnnnnnnnnnnnnnnnnnnnnnnnnnnnnnnnnnnnnnnnnnnnnnnnnnnnnnnnnnnnnnnnnnnnnnnnnnnnnnnnnnnnnnnnnnnnnnnnnnnnnnnnnnnnnnnnnnnnnnnnnnnnnnnnnnnnnnnnnnnnnnnnnnnnnnnnnnnnnnnnnnnnnnnnnnnnnnnnnnnnnnnnnnnnnnnnnnnnnnnnnnnnnnnnnnnnnnnnnnnnnnnnnnnnnnnnnnnnnnnnnnnnnnnnnnnnnnnnnnnnnnnnnnnnnnnnnnnnnnnnnnnnnnnnnnnnnnnnnnnnnnnnnnnnnnnnnnnnnnnnnnnnnnnnnnnnnnnnnnnnnnnnnnnnnnnnnnnnnnnnnnnnnnnnnnnnnnnnnnnnnnnnnnnnnnnnnnnnnnnnnnnnnnnnnnnnnnnnnnnnnnnnnnnnnnnnnnnnnnnnnnnnnnnnnnnnnnnnnnnnnnnnnnnnnnnnnnnnnnnnnnnnnnnnnnnnnnnnnnnnnnnnnnnnnnnnnnnnnnnnnnnnnnnnnnnnnnnnnnnnnnnnnnnnnnnnnnnnnnnnnnnnnnnnnnnnnnnnnnnnnnnnnnnnnnnnnnnnnnnnnnnnnnnnnnnnnnnnnnnnnnnnnnnnnnnnnnnnnnnnnnnnnnnnnnnnnnnnnnnnnnnnnnnnnnnnnnnnnnnnnnnnnnnnnnnnnnnnnnnnnnnnnnnnnnnnnnnnnnnnnnnnnnnnnnnnnnnnnnnnnnnnnnnnnnnnnnnnnnnnnnnnnnnnnnnnnnnnnnnnnnnnnnnnnnnnnnnnnnnnnnnnnnnnnnnnnnnnnnnnnnnnnnnnnnnnnnnnnnnnnnnnnnnnnnnnnnnnnnnnnnnnnnnnnnnnnnnnnnnnnnnnnnnnnnnnnnnnnnnnnnnnnnnnnnnnnnnnnnnnnnnnnnnnnnnnnnnnnnnnnnnnnnnnnnnnnnnnnnnnnnnnnnnnnnnnnnnnnnnnnnnnnnnnnnnnnnnnnnnnnnnnnnnnnnnnnnnnnnnnnnnnnnnnnnnnnnnnnnnnnnnnnnnnnnnnnnnnnnnnnnnnnnnnnnnnnnnnnnnnnnnnnnnnnnnnnnnnnnnnnnnnnnnnnnnnnnnnnnnnnnnnnnnnnnnnnnnnnnnnnnnnnnnnnnnnnnnnnnnnnnnnnnnnnnnnnnnnnnnnnnnnnnnnnnnnnnnnnnnnnnnnnnnnnnnnnnnnnnnnnnnnnnnnnnnnnnnnnnnnnnnnnnnnnnnnnnnnnnnnnnnnnnnnnnnnnnnnnnnnnnnnnnnnnnnnnnnnnnnnnnnnnnnnnnnnnnnnnnnnnnnnnnnnnnnnnnnnnnnnnnnnnnnnnnnnnnnnnnnnnnnnnnnnnnnnnnnnnnnnnnnnnnnnnnnnnnnnnnnnnnnnnnnnnnnnnnnnnnnnnnnnnnnnnnnnnnnnnnnnnnnnnnnnnnnnnnnnnnnnnnnnnnnnnnnnnnnnnnnnnnnnnnnnnnnnnnnnnnnnnnnnnnnnnnnnnnnnnnnnnnnnnnnnnnnnnnnnnnnnnnnnnnnnnnnnnnnnnnnnnnnnnnnnnnnnnnnnnnnnnnnnnnnnnnnnnnnnnnnnnnnnnnnnnnnnnnnnnnnnnnnnnnnnnnnnnnnnnnnnnnnnnnnnnnnnnnnnnnnnnnnnnnnnnnnnnnnnnnnnnnnnnnnnnnnnnnnnnnnnnnnnnnnnnnnnnnnnnnnnnnnnnnnnnnnnnnnnnnnnnnnnnnnnnnnnnnnnnnnnnnnnnnnnnnnnnnnnnnnnnnnnnnnnnnnnnnnnnnnnnnnnnnnnnnnnnnnnnnnnnnnnnnnnnnnnnnnnnnnnnnnnnnnnnnnnnnnnnnnnnnnnnnnnnnnnnnnnnnnnnnnnnnnnnnnnnnnnnnnnnnnnnnnnnnnnnnnnnnnnnnnnnnnnnnnnnnnnnnnnnnnnnnnnnnnnnnnnnnnnnnnnnnnnnnnnnnnnnnnnnnnnnnnnnnnnnnnnnnnnnnnnnnnnnnnnnnnnnnnnnnnnnnnnnnnnnnnnnnnnnnnnnnnnnnnnnnnnnnnnnnnnnnnnnnnnnnnnnnnnnnnnnnnnnnnnnnnnnnnnnnnnnnnnnnnnnnnnnnnnnnnnnnnnnnnnnnnnnnnnnnnnnnnnnnnnnnnnnnnnnnnnnnnnnnnnnnnnnnnnnnnnnnnnnnnnnnnnnnnnnnnnnnnnnnnnnnnnnnnnnnnnnnnnnnnnnnnnnnnnnnnnnnnnnnnnnnnnnnnnnnnnnnnnnnnnnnnnnnnnnnnnnnnnnnnnnnnnnnnnnnnnnnnnnnnnnnnnnnnnnnnnnnnnnnnnnnnnnnnnnnnnnnnnnnnnnnnnnnnnnnnnnnnnnnnnnnnnnnnnnnnnnnnnnnnnnnnnnnnnnnnnnnnnnnnnnnnnnnnnnnnnnnnnnnnnnnnnnnnnnnnnnnnnnnnnnnnnnnnnnnnnnnnnnnnnnnnnnnnnnnnnnnnnnnnnnnnnnnnnnnnnnnnnnnnnnnnnnnnnnnnnnnnnnnnnnnnnnnnnnnnnnnnnnnnnnnnnnnnnnnnnnnnnnnnnnnnnnnnnnnnnnnnnnnnnnnnnnnnnnnnnnnnnnnnnnnnnnnnnnnnnnnnnnnnnnnnnnnnnnnnnnnnnnnnnnnnnnnnnnnnnnnnnnnnnnnnnnnnnnnnnnnnnnnnnnnnnnnnnnnnnnnnnnnnnnnnnnnnnnnnnnnnnnnnnnnnnnnnnnnnnnnnnnnnnnnnnnnnnnnnnnnnnnnnnnnnnnnnnnnnnnnnnnnnnnnnnnnnnnnnnnnnnnnnnnnnnnnnnnnnnnnnnnnnnnnnnnnnnnnnnnnnnnnnnnnnnnnnnnnnnnnnnnnnnnnnnnnnnnnnnnnnnnnnnnnnnnnnnnnnnnnnnnnnnnnnnnnnnnnnnnnnnnnnnnnnnnnnnnnnnnnnnnnnnnnnnnnnnnnnnnnnnnnnnnnnnnnnnnnnnnnnnnnnnnnnnnnnnnnnnnnnnnnnnnnnnnnnnnnnnnnnnnnnnnnnnnnnnnnnnnnnnnnnnnnnnnnnnnnnnnnnnnnnnnnnnnnnnnnnnnnnnnnnnnnnnnnnnnnnnnnnnnnnnnnnnnnnnnnnnnnnnnnnnnnnnnnnnnnnnnnnnnnnnnnnnnnnnnnnnnnnnnnnnnnnnnnnnnnnnnnnnnnnnnnnnnnnnnnnnnnnnnnnnnnnnnnnnnnnnnnnnnnnnnnnnnnnnnnnnnnnnnnnnnnnnnnnnnnnnnnnnnnnnnnnnnnnnnnnnnnnnnnnnnnnnnnnnnnnnnnnnnnnnnnnnnnnnnnnnnnnnnnnnnnnnnnnnnnnnnnnnnnnnnnnnnnnnnnnnnnnnnnnnnnnnnnnnnnnnnnnnnnnnnnnnnnnnnnnnnnnnnnnnnnnnnnnnnnnnnnnnnnnnnnnnnnnnnnnnnnnnnnnnnnnnnnnnnnnnnnnnnnnnnnnnnnnnnnnnnnnnnnnnnnnnnnnnnnnnnnnnnnnnnnnnnnnnnnnnnnnnnnnnnnnnnnnnnnnnnnnnnnnnnnnnnnnnnnnnnnnnnnnnnnnnnnnnnnnnnnnnnnnnnnnnnnnnnnnnnnnnnnnnnnnnnnnnnnnnnnnnnnnnnnnnnnnnnnnnnnnnnnnnnnnnnnnnnnnnnnnnnnnnnnnnnnnnnnnnnnnnnnnnnnnnnnnnnnnnnnnnnnnnnnnnnnnnnnnnnnnnnnnnnnnnnnnnnnnnnnnnnnnnnnnnnnnnnnnnnnnnnnnnnnnnnnnnnnnnnnnnnnnnnnnnnnnnnnnnnnnnnnnnnnnnnnnnnnnnnnnnnnnnnnnnnnnnnnnnnnnnnnnnnnnnnnnnnnnnnnnnnnnnnnnnnnnnnnnnnnnnnnnnnnnnnnnnnnnnnnnnnnnnnnnnnnnnnnnnnnnnnnnnnnnnnnnnnnnnnnnnnnnnnnnnnnnnnnnnnnnnnnnnnnnnnnnnnnnnnnnnnnnnnnnnnnnnnnnnnnnnnnnnnnnnnnnnnnnnnnnnnnnnnnnnnnnnnnnnnnnnnnnnnnnnnnnnnnnnnnnnnnnnnnnnnnnnnnnnnnnnnnnnnnnnnnnnnnnnnnnnnnnnnnnnnnnnnnnnnnnnnnnnnnnnnnnnnnnnnnnnnnnnnnnnnnnnnnnnnnnnnnnnnnnnnnnnnnnnnnnnnnnnnnnnnnnnnnnnnnnnnnnnnnnnnnnnnnnnnnnnnnnnnnnnnnnnnnnnnnnnnnnnnnnnnnnnnnnnnnnnnnnnnnnnnnnnnnnnnnnnnnnnnnnnnnnnnnnnnnnnnnnnnnnnnnnnnnnnnnnnnnnnnnnnnnnnnnnnnnnnnnnnnnnnnnnnnnnnnnnnnnnnnnnnnnnnnnnnnnnnnnnnnnnnnnnnnnnnnnnnnnnnnnnnnnnnnnnnnnnnnnnnnnnnnnnnnnnnnnnnnnnnnnnnnnnnnnnnnnnnnnnnnnnnnnnnnnnnnnnnnnnnnnnnnnnnnnnnnnnnnnnnnnnnnnnnnnnnnnnnnnnnnnnnnnnnnnnnnnnnnnnnnnnnnnnnnnnnnnnnnnnnnnnnnnnnnnnnnnnnnnnnnnnnnnnnnnnnnnnnnnnnnnnnnnnnnnnnnnnnnnnnnnnnnnnnnnnnnnnnnnnnnnnnnnnnnnnnnnnnnnnnnnnnnnnnnnnnnnnnnnnnnnnnnnnnnnnnnnnnnnnnnnnnnnnnnnnnnnnnnnnnnnnnnnnnnnnnnnnnnnnnnnnnnnnnnnnnnnnnnnnnnnnnnnnnnnnnnnnnnnnnnnnnnnnnnnnnnnnnnnnnnnnnnnnnnnnnnnnnnnnnnnnnnnnnnnnnnnnnnnnnnnnnnnnnnnnnnnnnnnnnnnnnnnnnnnnnnnnnnnnnnnnnnnnnnnnnnnnnnnnnnnnnnnnnnnnnnnnnnnnnnnnnnnnnnnnnnnnnnnnnnnnnnnnnnnnnnnnnnnnnnnnnnnnnnnnnnnnnnnnnnnnnnnnnnnnnnnnnnnnnnnnnnnnnnnnnnnnnnnnnnnnnnnnnnnnnnnnnnnnnnnnnnnnnnnnnnnnnnnnnnnnnnnnnnnnnnnnnnnnnnnnnnnnnnnnnnnnnnnnnnnnnnnnnnnnnnnnnnnnnnnnnnnnnnnnnnnnnnnnnnnnnnnnnnnnnnnnnnnnnnnnnnnnnnnnnnnnnnnnnnnnnnnnnnnnnnnnnnnnnnnnnnnnnnnnnnnnnnnnnnnnnnnnnnnnnnnnnnnnnnnnnnnnnnnnnnnnnnnnnnnnnnnnnnnnnnnnnnnnnnnnnnnnnnnnnnnnnnnnnnnnnnnnnnnnnnnnnnnnnnnnnnnnnnnnnnnnnnnnnnnnnnnnnnnnnnnnnnnnnnnnnnnnnnnnnnnnnnnnnnnnnnnnnnnnnnnnnnnnnnnnnnnnnnnnnnnnnnnnnnnnnnnnnnnnnnnnnnnnnnnnnnnnnnnnnnnnnnnnnnnnnnnnnnnnnnnnnnnnnnnnnnnnnnnnnnnnnnnnnnnnnnnnnnnnnnnnnnnnnnnnnnnnnnnnnnnnnnnnnnnnnnnnnnnnnnnnnnnnnnnnnnnnnnnnnnnnnnnnnnnnnnnnnnnnnnnnnnnnnnnnnnnnnnnnnnnnnnnnnnnnnnnnnnnnnnnnnnnnnnnnnnnnnnnnnnnnnnnnnnnnnnnnnnnnnnnnnnnnnnnnnnnnnnnnnnnnnnnnnnnnnnnnnnnnnnnnnnnnnnnnnnnnnnnnnnnnnnnnnnnnnnnnnnnnnnnnnnnnnnnnnnnnnnnnnnnnnnnnnnnnnnnnnnnnnnnnnnnnnnnnnnnnnnnnnnnnnnnnnnnnnnnnnnnnnnnnnnnnnnnnnnnnnnnnnnnnnnnnnnnnnnnnnnnnnnnnnnnnnnnnnnnnnnnnnnnnnnnnnnnnnnnnnnnnnnnnnnnnnnnnnnnnnnnnnnnnnnnnnnnnnnnnnnnnnnnnnnnnnnnnnnnnnnnnnnnnnnnnnnnnnnnnnnnnnnnnnnnnnnnnnnnnnnnnnnnnnnnnnnnnnnnnnnnnnnnnnnnnnnnnnnnnnnnnnnnnnnnnnnnnnnnnnnnnnnnnnnnnnnnnnnnnnnnnnnnnnnnnnnnnnnnnnnnnnnnnnnnnnnnnnnnnnnnnnnnnnnnnnnnnnnnnnnnnnnnnnnnnnnnnnnnnnnnnnnnnnnnnnnnnnnnnnnnnnnnnnnnnnnnnnnnnnnnnnnnnnnnnnnnnnnnnnnnnnnnnnnnnnnnnnnnnnnnnnnnnnnnnnnnnnnnnnnnnnnnnnnnnnnnnnnnnnnnnnnnnnnnnnnnnnnnnnnnnnnnnnnnnnnnnnnnnnnnnnnnnnnnnnnnnnnnnnnnnnnnnnnnnnnnnnnnnnnnnnnnnnnnnnnnnnnnnnnnnnnnnnnnnnnnnnnnnnnnnnnnnnnnnnnnnnnnnnnnnnnnnnnnnnnnnnnnnnnnnnnnnnnnnnnnnnnnnnnnnnnnnnnnnnnnnnnnnnnnnnnnnnnnnnnnnnnnnnnnnnnnnnnnnnnnnnnnnnnnnnnnnnnnnnnnnnnnnnnnnnnnnnnnnnnnnnnnnnnnnnnnnnnnnnnnnnnnnnnnnnnnnnnnnnnnnnnnnnnnnnnnnnnnnnnnnnnnnnnnnnnnnnnnnnnnnnnnnnnnnnnnnnnnnnnnnnnnnnnnnnnnnnnnnnnnnnnnnnnnnnnnnnnnnnnnnnnnnnnnnnnnnnnnnnnnnnnnnnnnnnnnnnnnnnnnnnnnnnnnnnnnnnnnnnnnnnnnnnnnnnnnnnnnnnnnnnnnnnnnnnnnnnnnnnnnnnnnnnnnnnnnnnnnnnnnnnnnnnnnnnnnnnnnnnnnnnnnnnnnnnnnnnnnnnnnnnnnnnnnnnnnnnnnnnnnnnnnnnnnnnnnnnnnnnnnnnnnnnnnnnnnnnnnnnnnnnnnnnnnnnnnnnnnnnnnnnnnnnnnnnnnnnnnnnnnnnnnnnnnnnnnnnnnnnnnnnnnnnnnnnnnnnnnnnnnnnnnnnnnnnnnnnnnnnnnnnnnnnnnnnnnnnnnnnnnnnnnnnnnnnnnnnnnnnnnnnnnnnnnnnnnnnnnnnnnnnnnnnnnnnnnnnnnnnnnnnnnnnnnnnnnnnnnnnnnnnnnnnnnnnnnnnnnnnnnnnnnnnnnnnnnnnnnnnnnnnnnnnnnnnnnnnnnnnnnnnnnnnnnnnnnnnnnnnnnnnnnnnnnnnnnnnnnnnnnnnnnnnnnnnnnnnnnnnnnnnnnnnnnnnnnnnnnnnnnnnnnnnnnnnnnnnnnnnnnnnnnnnnnnnnnnnnnnnnnnnnnnnnnnnnnnnnnnnnnnnnnnnnnnnnnnnnnnnnnnnnnnnnnnnnnnnnnnnnnnnnnnnnnnnnnnnnnnnnnnnnnnnnnnnnnnnnnnnnnnnnnnnnnnnnnnnnnnnnnnnnnnnnnnnnnnnnnnnnnnnnnnnnnnnnnnnnnnnnnnnnnnnnnnnnnnnnnnnnnnnnnnnnnnnnnnnnnnnnnnnnnnnnnnnnnnnnnnnnnnnnnnnnnnnnnnnnnnnnnnnnnnnnnnnnnnnnnnnnnnnnnnnnnnnnnnnnnnnnnnnnnnnnnnnnnnnnnnnnnnnnnnnnnnnnnnnnnnnnnnnnnnnnnnnnnnnnnnnnnnnnnnnnnnnnnnnnnnnnnnnnnnnnnnnnnnnnnnnnnnnnnnnnnnnnnnnnnnnnnnnnnnnnnnnnnnnnnnnnnnnnnnnnnnnnnnnnnnnnnnnnnnnnnnnnnnnnnnnnnnnnnnnnnnnnnnnnnnnnnnnnnnnnnnnnnnnnnnnnnnnnnnnnnnnnnnnnnnnnnnnnnnnnnnnnnnnnnnnnnnnnnnnnnnnnnnnnnnnnnnnnnnnnnnnnnnnnnnnnnnnnnnnnnnnnnnnnnnnnnnnnnnnnnnnnnnnnnnnnnnnnnnnnnnnnnnnnnnnnnnnnnnnnnnnnnnnnnnnnnnnnnnnnnnnnnnnnnnnnnnnnnnnnnnnnnnnnnnnnnnnnnnnnnnnnnnnnnnnnnnnnnnnnnnnnnnnnnnnnnnnnnnnnnnnnnnnnnnnnnnnnnnnnnnnnnnnnnnnnnnnnnnnnnnnnnnnnnnnnnnnnnnnnnnnnnnnnnnnnnnnnnnnnnnnnnnnnnnnnnnnnnnnnnnnnnnnnnnnnnnnnnnnnnnnnnnnnnnnnnnnnnnnnnnnnnnnnnnnnnnnnnnnnnnnnnnnnnnnnnnnnnnnnnnnnnnnnnnnnnnnnnnnnnnnnnnnnnnnnnnnnnnnnnnnnnnnnnnnnnnnnnnnnnnnnnnnnnnnnnnnnnnnnnnnnnnnnnnnnnnnnnnnnnnnnnnnnnnnnnnnnnnnnnnnnnnnnnnnnnnnnnnnnnnnnnnnnnnnnnnnnnnnnnnnnnnnnnnnnnnnnnnnnnnnnnnnnnnnnnntccccgccggaagtgcggtcagaggctaatatatcatagctgtatagctaagacaagaaaatttcttaatttttcgattttcttgattttttcacagcttctttttgtcgggatgtatgcgccacagggacgatatattgttggggtgggttctacgacatgaacatctggagccccaagaagcgagacgagaaattgaatcacaggcgcgacaatcccgtcaaacgagtgctggtcaagcacccgggcgactggccgtggtcgcgctgcggcgggaggttctatttctggaatgatggttcgatcttgagcatggacaagaggctatgaaggtgtcgacatgccgaggggcgcatacatcccgacaaaaacccgtcgggacgtatgcgccacccgcgaaatcgatcgcaagattccctccgaatcggaacgccgcggaggcatcaaagcttctgcgcttagtcaacggcgcgccttgcagcctgtgaagtgtgggctaagcggacgcgataaccgttgtcgtggtcttcgggccttgcctttgccgcgtcccgggtgtataccttcgccatgattgtcctgtggtagctacgcagcggacggtccggtccccccggggcgcgacgggcctgccacccgcctcttgcccaggcaaggaggaagccgtggagtacaacctgctcgaagaaaagtggattcccgttctgtggaaagatgggcacagcggtcgcgtgggcattagtgaggcccttaggcaagcaggccggattcgccaaatcgcggccagcaacccaatggaccgcctggccatcctgcgtttcctgcttgcgttgctctattggtgcaaagggaatcccccggacgacaagaactcgatttcttcgtttccctctgattggttcaagaaactcgatgacaacaaagactgtttcaaccttcagggcgatgggaagcggttttaccaacgcaagcctaaccgacttgagaagaagctgtccgtcaactatctgatgcaagaagtgccgaccggcacaaacttctggcacttccggcatgggacagatttcagaaacggcttatgtccggcatgctgcgcaatgggcttgttgcgccttccgctctttgctacgtcggccgggcgcggcaagcccccgggcgtcaatcaaaaaccgccgatctacatcgtgccgatgggcgactgcctttccgaaaccctgcgcctctcatggcggaagacgtcggagatgaacctgggcacgcccacatgggaaaatccggacataagcctccctcaacacggcaatgttccattattgataggattaacgtgggtaccgcggcgcgtctggttagacactccggagacaccagagtccaactgcatcgcctgcgggcgcagggaggctctgatacgtcaatgtgtctttgcgggtattgggagcacaaagacaggcgaaggcagtctggcacgaatctggaacgacccgcacaccatcagcgaaggcgacgagattgtgaagcctttcagcgcgcttggcccggccgacgctgcggctgggaagtggacgaaggtcgtggcgggaatcctgtgcggggaaaagccgaaggggaacagtaagttgtgggtcgtcagctttgcgacagtgcagaacgacaaatacctggaagcagccgagcgggagattcaattcttggccgcgctcgacgacgtgaaggttcaggcgagtttgcaagaaatccaggcgtggcagaaggaaggctggaagctcgttggcagagccaaaccgcgagagacttcacgaaacagaggacaccttgaaattctctccgcagtcgccgctgttcgtccccaagccgaggcaacggtttccggaaaaatcgacgagatgatcgcagaaggcggtaaggcatgggaagaggcggcccaggaatatcgtccgttgatggccgccgtcgccaaatcgctttccccgggctacacaaccgcttccctccggaggcgacaagaaattgccgctgtaaagccggacatgcggccaaagagaaacaacaaagacgaagggggggacaagtgactccaacggagcagtacgtcgaagttctgactcgactgaaacccggtgagctcgggctcttgcgcaaccatgccgggcaagggctcgacgaatcggtagagggctttgaccttttcgcaggcctttggtggccgctgcgggcgcaaacccaacgggcgcctcgccgtgaggtggcctggcttgtcgccaaactctacgccctccggcccctcgagcattcaccccgcgagaccctcgctcgccagctcgggcgatcccggccgggcgagaaaacagcgcggcagcgtttcgagcaacgcttcgacaggatgctcacgctgccgcttgctgaaatcgaacccgccctacagtgggcaatcgacctcatagcttccaagcacctcgaactcgactgggtgcggctgacgaacgatctttccatctgggaacgcgaatccacccggctcaaatgggccgaggaatttttgaactgtccaagaggaggagagtcatgttgatccagattcacgccattcagaatcacagcccggccaacctgaaccgggatgacctgggcgcgcccaagacttgcttttttggcggagtcttgcgctcccgtatttccagccagtgccttaagcgcagcatccgcatgagtgaggagttcagacaattgctgggcggagttcgcacccgccagttggcgaaagagattgcggaaaaggtgacgggcaaagacgtcaggaagcgagcggagaacattctcaaagcctgcgggctggagcctaagaaagcaaaaaaacaggaaggagaagacgaacaggaaagtgctgagaggagcaagatgctggtttacaccacccaagaggcgattacacgcatggccgaactcctccagcagggcgacggaaaaacggacgaggccttggcagcggagttcggcaagctcatcagtgaatccgtcgccgtgccggacatggcgctgagcggcaggatgcttgaaacgggagtcctcaaagacacgacggttgaggcatcgcttcaagtcgcccatgccatttccacccatgaggcccggcccgaggtggactactatgtcgccgccgatgatgtccccggcgaggacgcgggcgcaggttacgtggatgaagccatgttcggttcggcatgtttctacaagtatttctccattcattgggaaacgctggtcaaaaacctgaagcccttcgggacgaatcacgaaaaactggcggcccataccgtcggcgccttcattcgcgccgcggccttggccaaccccacgggaaaacaaaatagttttgccgcgcacaaccctcctgacgggatgttggtggaagtcagaaacactcccatcagctacgccaacgccttcgccaaaccggcggctcctcagggcgaacgggacatcatctcgcagagcgtggcgcagcttgcccattatgtgaacgacatagatacgggatacggcaagccgacgaagcggttctggttctctccaaatctccgctatccgttgacggctaccaccacggagagcgaagacggaaaacagaaacagcgtgaggtcccgcttgccgacaaagatgttaagtctcttgacgaactgatagcggctgtactcaaggaaatcggttacgactggcaggaggccaagaaagtggtcctgaatccggaggtgccccatgagcgcaaagacgctgctacttcggcttgaaggtcctcttcaggcatggggcgatcagcaatccaagttcgtcattcggcgcacggccgaggcgccgaccaagtccggcgtcatcgggatgctttgcgcggcattgggcgtttcccggccagaggcccgcgaaggctggcttccaaggctggcccggctgcgcatgggcgtacgcgtcgatgcgccaggggtccgctggtgggattatcacacggtgggtgcggggatgccgatgcgtaccgccgaggggggaaccaagtccggagccatgctcacccgccgcgaatacctttgcgacgcctcgtttctcgtcgctcttcagggcgaaccggacctcattgaggaactggaggcggcaatcaaagcgcccaagtggacactctacctcggcagaaagtgctgccccccttgccgccctctgctggagcatccgggaggtgaattccccgacttgctttctgccctcgaatcggtcccctggcgtcggcggctgaaggacgatccccagccgcgacccgtcgattgcctgcttgattgggaacccaccaacgagcagcccgaggcgcccgatgatgcgctcgtctggtacgacgtgccgttgacattcgagccgccgtcgcaccaaccccgattcgtcatccgcaggcagttgcgcgtcggagcggacggcgacgtaacacttgcggtgcagccaccgcagagcgacacgccaccgcctccgcgcccaagagcggattacacgaacacagagtacaaaaaccgacgcaaggagcggctcgacgacgactatcacttgtgcgttttttgcaagtctcccgccagcaccgtgcagcacatcacgtaccgccgcgcgggcggcggcgaactccgggacgatttgcgctccctctgccgcctctgccacgacgccgtgaccatgatcgagtacgggctcggaatgggcttggaccgcatcaaccccgaagagccccgttggcgcgacaagatcatcgagaagcgggaagagattatcaggttccgctctctggagactcgccgcagacgccttgccgctgaggaggtggaatagccatgtacctctcctgcctcttgattgacgtcggcaccaaccccgaccgccccaggcccgggcggctctggctgcgaaacctccatcacgtccaccagcgcctttgcatggcgtttccatccaaagaccgaatatcccacgatccccacttcctcaagcctttcaaacccgcggactttgccaacaaccaggtccatgtaagacgtgacggcgactccggctttctcttccgcatcgacccgcaaccgggcgggcgggtcgtgatcctcgtccagtctaactctgccgtaaagcctgactggggctacgccttccacaacgcccgttttcttctgaatcctctagccgctccccctcaggtgcaggaattcgacccccgctttgagaagggtcagcggcttcgcttccgtatccgcgccaatctgagtaagaagataaaaaccagcacagagggcgttgatcttacgaggacgcgagaggggacagataagcggggccgcccgaaggcccaaggcaaacgcgtggcgctgacctgggacaaggaccagaaccgcgacgatgtgatacgaaaatggttcgccggcaagggcggccaaggtggattccaagtggaaactttccgggtcttgcagatcgggtggggcgcaggagaccgatccgacccgaggccgacgggcggccgcatgaaatttcgctcggcgttattggaggggacgcttacggttgaggacgcggacagcttcagagaaaccatcgtgggcggcgttgggcacggcaaagccttcggcttcggcctgctttccgtggcgccgctctcgctgtagcggcggtctccgaccgccggtacgtcgatcggagatcgacgctacaatcccttgtcgatcggggatccgtgcaacatttcttgagcggagatcgagccaatatgaaattcaaaccccgcttgcggcgactggactggctctatacgggcagcccaatctactatctcacgctgtgtacgcaggaccgcaaacgctcgttggcaaatcctgcgattcaccgggaattcacgagattctccgaacgggcgagcgattttcttgtttgggtcgggttcttcatgatcatgcctgatcacatccatcttttcgccggcttttgtcgtgagtccccacctttagggaaatggatcaaggcgctgcgcggggatttatccaaagtcctccgggaagatgagggcgagggcacacattgggagaaagactttttcgatcacgtcctgagatcgcaagaatcctatcgggagaaatatgaatatgtccggcagaatccggtccgggccggtttagtcaagcgcccggaagattggccgtaccagggtgagatccatcgcctggttttgtagcggcggtctccgaccgccgtaacgtcgatcggagatcgactacaaccccggtcgatcggagatcgacgctacaaccgccgtcgatcggagatcgacgctacagcacgggctggaggctctgtgagaattcaagatctccacgttctacccaagttcagtgacgggtggagttatctgtacgtcgagcattgccacgtcgatcaggaagagcgggccattgccgtccacgatcaagccgggaaggtgccggtcccctgtgccaatctggctctcctgatgttgggtccgggcgtctcgattactcacgccgccatctccgtgttggcggaccatgggtgcctggtggcttggtgcggggaggagggagtccgcttctacgccgtgggcatgggcgagacgcgcaacgcggccaacttcctgcatcaggcgaggctgtgggcggaccagggtttccatatgcaggtggtgcgccgcctctatcagttgcgattttcggagaagttcgaccctgccctgaccctccagcaaatccgcggcatggagggcgtgcgggtgcgcgatgcctacgccaaggccgcccaggaagccggcatcacgtggtcgggccgcagctataaacgcgatgagtggagcaaggcggaccctgccaaccgagccttgtccgccgctaactcctgcctatatggaatctgccatgctgccatcgtgtcagcaggtttttcgcccgcactcgggtttatccacaccggcaagatgctgtccttcgtctacgatctcgccgacctgtacaaggctgaaattaccgttccagtggcatttcgcgccgccgccgaggggacgggacagttggaacgccgggtgcgcatcacctgccgcgatcagttcgtatccacgcggcttctggagagaatcatcccggatgtccaaagggcgttgatgctggcaaaagcgacggcctgggacactaccttcgacctggatgccgccgcccccggcttcctctgggacaatctggaaggagaggtcgaaggcggccgcctgctagcccctgaaatcggtgaaacggagcccggcgatggtggtcctgattcttgagcgcgtccccccagggttgcgaggcgagctgactcgctggtttttggaacctcaggcgggagtgttcgtgggacgcgtctccgccatggtccgtgatcggctctgggaaaaagcctgcagccaggccaagggaggcgggtgcttgattatctattcaagcgacaatgaacagggctttcgagtccgaacctggggccaaacagctcgggtcatcgatgacttcgagggcctttttctcgttcgcatgccgcagaatcaataatttagtaagtgttgtccccacgcgcgtgggggtgaaccgccggggctgaaggtttcatgggctggaaagaagttgtccccacgcgcgtgggggtgaaccgatatgctgcatgtgccggggctggcgcttgatgttgtccccacgcgcgtgggggtgaaccggtatcggcgagtggcaaggcgaatccacttaggttgtccccacgcgcgtgggggtgaaccgacctccgagggcgcggggcgcgtgctggcgatgttgtccccacgcgcgtgggggtgaaccggctggggccgacgcgcgcttgtgagactgcgggttgtccccacgcgcgtgggggtgaaccgcgggagaactttgaaggcacggtcctcgatcacgttgtccccacgcgcgtgggggtgaaccggcgcaggttaaggctgaggccaaggccgatgcgttgtccccacgcgcgtgggggtgaaccgtaatggtggcttgcaccttctgctcgaccgatgttgtccccacgcgcgtgggggtgaaccgcagcgggccgtgttggaggagaaggtcgcggagttgtccccacgcgcgtgggggtgaaccgttcccagccgcaggcaggatcaccgtaccccagttgtccccacgcgcgtgggggtgaaccgcaaaacaatatcaagaccaagcacttggatgtgttgtccccacgcgcgtgggggtgaaccgcatcgggcagcacagcggccttataccccaaagttgtccccacgcgcgtgggggtgaaccggcagctcgcggcgattcgcattgccgctgaaagttgtccccacgcgcgtgggggtgaaccggggagtcgtgagtgtagttacaggcagggttcgttgtccccacgcgcgtgggggtgaaccgcttctgcatcttataaagaacgccagtttgaagttgtccccacgcgcgtgggggtgaaccggtacggttcccaggggaattatttcttggggtgttgtccccacgcgcgtgggggtgaaccgatgtagcttgatatgggtgtggtgtcgcagaagttgtccccacgcgcgtgggggtgaaccggcggcgcgcacattccaacctcgtccgtatccgttgtccccacgcgcgtgggggtgaaccggcggacacggcggatgtgacgaatatggagtcgttgtccccacgcgcgtgggggtgaaccggtctctcgaaaaggaaagccaactttcagcttgttgtccccacgcgcgtgggggtgaaccgctcttggcatagagcttagtgagtttgatgaagttgtccccacgcgcgtgggggtgaaccgcctttgccctccgagacgcaacagctccattcgttgtccccacgcgcgtgggggtgaaccggcgagcgcaggtctaagcgaccgcgacaaagagttgtccccacgcgcgtgggggtgaaccggtgatggacacttcctaaaatggcattaagtcgttgtccccacgcgcgtgggggtgaaccgcagcgggtagcgcagacttcgtgcatatcgaagtctgcggcttttgccgccgtgaatcttgaaaagccgcagacctgcaaaaagcgcaggtctgcgctacccactgcctggccatcctggagaattgaaagtccctccagtaaagcggcgaagcgcaggatttccggctgcttcaatcgcttgcgacgctcaccggtcagtagcgcgttggtaatttcgagcccccatacggctggaacaacgagcgtctgcccttcagtgccaccaggaccccgtccgcgtattcgctcgcttcatccggggagcaccaggcaagcgccaccgacgcatgcaccacaacgccgctcaaaatcgccgtccctcaattatcatttcgcggacgctcatggtgtggggctttacgcgcttgcgcaacgcgcgcatgccctcgacaatctcctcgtgcgtcagctttcgatccgagtctcgaaccggcaccagcattgccgccggaacgccgtgtcttgtaatcgtgatcctttcgcaacccatcttgtccagctaaagctccgcatcagctatagtctccctctggccgtgcggcccgccccttgcggcgcaaccaaaccgaagctcaaaacgcgacatcgtcctcgtagcgcgaccggacactgaaggtaaaggttcgccacccgtctcccctgcaaaaccgggtcgcggagtactattgctttgcacagcgggggacgaccgaggcgctacggaagaggttggttcgcgaaactgagcaagagacccctcacccgtcccgctccggctggtggaagcgccggagcgggacacgctcagccccaagggagagggctatggattcagttctacgcgcggtgtccagtcaaagatgtgggacacgctcagccccaagggagagggctatggattcagttctacgcgcggtg

SEQ ID NO: 1055 - DNA, 106286 bp, Artificial Sequence; identical to SEQ ID NO: 1038
  Synthetic Oligonucleotide
  misc_feature (1)..(96242): n is a, c, g, or t

SEQ ID NO: 1056 - DNA, 106279 bp, Artificial Sequence
  Synthetic Oligonucleotide
  misc_feature (1)..(96242): n is a, c, g, or t
nnnnnnnnnnnnnnnnnnnnnnnnnnnnnnnnnnnnnnnnnnnnnnnnnnnnnnnnnnnnnnnnnnnnnnnnnnnnnnnnnnnnnnnnnnnnnnnnnnnnnnnnnnnnnnnnnnnnnnnnnnnnnnnnnnnnnnnnnnnnnnnnnnnnnnnnnnnnnnnnnnnnnnnnnnnnnnnnnnnnnnnnnnnnnnnnnnnnnnnnnnnnnnnnnnnnnnnnnnnnnnnnnnnnnnnnnnnnnnnnnnnnnnnnnnnnnnnnnnnnnnnnnnnnnnnnnnnnnnnnnnnnnnnnnnnnnnnnnnnnnnnnnnnnnnnnnnnnnnnnnnnnnnnnnnnnnnnnnnnnnnnnnnnnnnnnnnnnnnnnnnnnnnnnnnnnnnnnnnnnnnnnnnnnnnnnnnnnnnnnnnnnnnnnnnnnnnnnnnnnnnnnnnnnnnnnnnnnnnnnnnnnnnnnnnnnnnnnnnnnnnnnnnnnnnnnnnnnnnnnnnnnnnnnnnnnnnnnnnnnnnnnnnnnnnnnnnnnnnnnnnnnnnnnnnnnnnnnnnnnnnnnnnnnnnnnnnnnnnnnnnnnnnnnnnnnnnnnnnnnnnnnnnnnnnnnnnnnnnnnnnnnnnnnnnnnnnnnnnnnnnnnnnnnnnnnnnnnnnnnnnnnnnnnnnnnnnnnnnnnnnnnnnnnnnnnnnnnnnnnnnnnnnnnnnnnnnnnnnnnnnnnnnnnnnnnnnnnnnnnnnnnnnnnnnnnnnnnnnnnnnnnnnnnnnnnnnnnnnnnnnnnnnnnnnnnnnnnnnnnnnnnnnnnnnnnnnnnnnnnnnnnnnnnnnnnnnnnnnnnnnnnnnnnnnnnnnnnnnnnnnnnnnnnnnnnnnnnnnnnnnnnnnnnnnnnnnnnnnnnnnnnnnnnnnnnnnnnnnnnnnnnnnnnnnnnnnnnnnnnnnnnnnnnnnnnnnnnnnnnnnnnnnnnnnnnnnnnnnnnnnnnnnnnnnnnnnnnnnnnnnnnnnnnnnnnnnnnnnnnnnnnnnnnnnnnnnnnnnnnnnnnnnnnnnnnnnnnnnnnnnnnnnnnnnnnnnnnnnnnnnnnnnnnnnnnnnnnnnnnnnnnnnnnnnnnnnnnnnnnnnnnnnnnnnnnnnnnnnnnnnnnnnnnnnnnnnnnnnnnnnnnnnnnnnnnnnnnnnnnnnnnnnnnnnnnnnnnnnnnnnnnnnnnnnnnnnnnnnnnnnnnnnnnnnnnnnnnnnnnnnnnnnnnnnnnnnnnnnnnnnnnnnnnnnnnnnnnnnnnnnnnnnnnnnnnnnnnnnnnnnnnnnnnnnnnnnnnnnnnnnnnnnnnnnnnnnnnnnnnnnnnnnnnnnnnnnnnnnnnnnnnnnnnnnnnnnnnnnnnnnnnnnnnnnnnnnnnnnnnnnnnnnnnnnnnnnnnnnnnnnnnnnnnnnnnnnnnnnnnnnnnnnnnnnnnnnnnnnnnnnnnnnnnnnnnnnnnnnnnnnnnnnnnnnnnnnnnnnnnnnnnnnnnnnnnnnnnnnnnnnnnnnnnnnnnnnnnnnnnnnnnnnnnnnnnnnnnnnnnnnnnnnnnnnnnnnnnnnnnnnnnnnnnnnnnnnnnnnnnnnnnnnnnnnnnnnnnnnnnnnnnnnnnnnnnnnnnnnnnnnnnnnnnnnnnnnnnnnnnnnnnnnnnnnnnnnnnnnnnnnnnnnnnnnnnnnnnnnnnnnnnnnnnnnnnnnnnnnnnnnnnnnnnnnnnnnnnnnnnnnnnnnnnnnnnnnnnnnnnnnnnnnnnnnnnnnnnnnnnnnnnnnnnnnnnnnnnnnnnnnnnnnnnnnnnnnnnnnnnnnnnnnnnnnnnnnnnnnnnnnnnnnnnnnnnnnnnnnnnnnnnnnnnnnnnnnnnnnnnnnnnnnnnnnnnnnnnnnnnnnnnnnnnnnnnnnnnnnnnnnnnnnnnnnnnnnnnnnnnnnnnnnnnnnnnnnnnnnnnnnnnnnnnnnnnnnnnnnnnnnnnnnnnnnnnnnnnnnnnnnnnnnnnnnnnnnnnnnnnnnnnnnnnnnnnnnnnnnnnnnnnnnnnnnnnnnnnnnnnnnnnnnnnnnnnnnnnnnnnnnnnnnnnnnnnnnnnnnnnnnnnnnnnnnnnnnnnnnnnnnnnnnnnnnnnnnnnnnnnnnnnnnnnnnnnnnnnnnnnnnnnnnnnnnnnnnnnnnnnnnnnnnnnnnnnnnnnnnnnnnnnnnnnnnnnnnnnnnnnnnnnnnnnnnnnnnnnnnnnnnnnnnnnnnnnnnnnnnnnnnnnnnnnnnnnnnnnnnnnnnnnnnnnnnnnnnnnnnnnnnnnnnnnnnnnnnnnnnnnnnnnnnnnnnnnnnnnnnnnnnnnnnnnnnnnnnnnnnnnnnnnnnnnnnnnnnnnnnnnnnnnnnnnnnnnnnnnnnnnnnnnnnnnnnnnnnnnnnnnnnnnnnnnnnnnnnnnnnnnnnnnnnnnnnnnnnnnnnnnnnnnnnnnnnnnnnnnnnnnnnnnnnnnnnnnnnnnnnnnnnnnnnnnnnnnnnnnnnnnnnnnnnnnnnnnnnnnnnnnnnnnnnnnnnnnnnnnnnnnnnnnnnnnnnnnnnnnnnnnnnnnnnnnnnnnnnnnnnnnnnnnnnnnnnnnnnnnnnnnnnnnnnnnnnnnnnnnnnnnnnnnnnnnnnnnnnnnnnnnnnnnnnnnnnnnnnnnnnnnnnnnnnnnnnnnnnnnnnnnnnnnnnnnnnnnnnnnnnnnnnnnnnnnnnnnnnnnnnnnnnnnnnnnnnnnnnnnnnnnnnnnnnnnnnnnnnnnnnnnnnnnnnnnnnnnnnnnnnnnnnnnnnnnnnnnnnnnnnnnnnnnnnnnnnnnnnnnnnnnnnnnnnnnnnnnnnnnnnnnnnnnnnnnnnnnnnnnnnnnnnnnnnnnnnnnnnnnnnnnnnnnnnnnnnnnnnnnnnnnnnnnnnnnnnnnnnnnnnnnnnnnnnnnnnnnnnnnnnnnnnnnnnnnnnnnnnnnnnnnnnnnnnnnnnnnnnnnnnnnnnnnnnnnnnnnnnnnnnnnnnnnnnnnnnnnnnnnnnnnnnnnnnnnnnnnnnnnnnnnnnnnnnnnnnnnnnnnnnnnnnnnnnnnnnnnnnnnnnnnnnnnnnnnnnnnnnnnnnnnnnnnnnnnnnnnnnnnnnnnnnnnnnnnnnnnnnnnnnnnnnnnnnnnnnnnnnnnnnnnnnnnnnnnnnnnnnnnnnnnnnnnnnnnnnnnnnnnnnnnnnnnnnnnnnnnnnnnnnnnnnnnnnnnnnnnnnnnnnnnnnnnnnnnnnnnnnnnnnnnnnnnnnnnnnnnnnnnnnnnnnnnnnnnnnnnnnnnnnnnnnnnnnnnnnnnnnnnnnnnnnnnnnnnnnnnnnnnnnnnnnnnnnnnnnnnnnnnnnnnnnnnnnnnnnnnnnnnnnnnnnnnnnnnnnnnnnnnnnnnnnnnnnnnnnnnnnnnnnnnnnnnnnnnnnnnnnnnnnnnnnnnnnnnnnnnnnnnnnnnnnnnnnnnnnnnnnnnnnnnnnnnnnnnnnnnnnnnnnnnnnnnnnnnnnnnnnnnnnnnnnnnnnnnnnnnnnnnnnnnnnnnnnnnnnnnnnnnnnnnnnnnnnnnnnnnnnnnnnnnnnnnnnnnnnnnnnnnnnnnnnnnnnnnnnnnnnnnnnnnnnnnnnnnnnnnnnnnnnnnnnnnnnnnnnnnnnnnnnnnnnnnnnnnnnnnnnnnnnnnnnnnnnnnnnnnnnnnnnnnnnnnnnnnnnnnnnnnnnnnnnnnnnnnnnnnnnnnnnnnnnnnnnnnnnnnnnnnnnnnnnnnnnnnnnnnnnnnnnnnnnnnnnnnnnnnnnnnnnnnnnnnnnnnnnnnnnnnnnnnnnnnnnnnnnnnnnnnnnnnnnnnnnnnnnnnnnnnnnnnnnnnnnnnnnnnnnnnnnnnnnnnnnnnnnnnnnnnnnnnnnnnnnnnnnnnnnnnnnnnnnnnnnnnnnnnnnnnnnnnnnnnnnnnnnnnnnnnnnnnnnnnnnnnnnnnnnnnnnnnnnnnnnnnnnnnnnnnnnnnnnnnnnnnnnnnnnnnnnnnnnnnnnnnnnnnnnnnnnnnnnnnnnnnnnnnnnnnnnnnnnnnnnnnnnnnnnnnnnnnnnnnnnnnnnnnnnnnnnnnnnnnnnnnnnnnnnnnnnnnnnnnnnnnnnnnnnnnnnnnnnnnnnnnnnnnnnnnnnnnnnnnnnnnnnnnnnnnnnnnnnnnnnnnnnnnnnnnnnnnnnnnnnnnnnnnnnnnnnnnnnnnnnnnnnnnnnnnnnnnnnnnnnnnnnnnnnnnnnnnnnnnnnnnnnnnnnnnnnnnnnnnnnnnnnnnnnnnnnnnnnnnnnnnnnnnnnnnnnnnnnnnnnnnnnnnnnnnnnnnnnnnnnnnnnnnnnnnnnnnnnnnnnnnnnnnnnnnnnnnnnnnnnnnnnnnnnnnnnnnnnnnnnnnnnnnnnnnnnnnnnnnnnnnnnnnnnnnnnnnnnnnnnnnnnnnnnnnnnnnnnnnnnnnnnnnnnnnnnnnnnnnnnnnnnnnnnnnnnnnnnnnnnnnnnnnnnnnnnnnnnnnnnnnnnnnnnnnnnnnnnnnnnnnnnnnnnnnnnnnnnnnnnnnnnnnnnnnnnnnnnnnnnnnnnnnnnnnnnnnnnnnnnnnnnnnnnnnnnnnnnnnnnnnnnnnnnnnnnnnnnnnnnnnnnnnnnnnnnnnnnnnnnnnnnnnnnnnnnnnnnnnnnnnnnnnnnnnnnnnnnnnnnnnnnnnnnnnnnnnnnnnnnnnnnnnnnnnnnnnnnnnnnnnnnnnnnnnnnnnnnnnnnnnnnnnnnnnnnnnnnnnnnnnnnnnnnnnnnnnnnnnnnnnnnnnnnnnnnnnnnnnnnnnnnnnnnnnnnnnnnnnnnnnnnnnnnnnnnnnnnnnnnnnnnnnnnnnnnnnnnnnnnnnnnnnnnnnnnnnnnnnnnnnnnnnnnnnnnnnnnnnnnnnnnnnnnnnnnnnnnnnnnnnnnnnnnnnnnnnnnnnnnnnnnnnnnnnnnnnnnnnnnnnnnnnnnnnnnnnnnnnnnnnnnnnnnnnnnnnnnnnnnnnnnnnnnnnnnnnnnnnnnnnnnnnnnnnnnnnnnnnnnnnnnnnnnnnnnnnnnnnnnnnnnnnnnnnnnnnnnnnnnnnnnnnnnnnnnnnnnnnnnnnnnnnnnnnnnnnnnnnnnnnnnnnnnnnnnnnnnnnnnnnnnnnnnnnnnnnnnnnnnnnnnnnnnnnnnnnnnnnnnnnnnnnnnnnnnnnnnnnnnnnnnnnnnnnnnnnnnnnnnnnnnnnnnnnnnnnnnnnnnnnnnnnnnnnnnnnnnnnnnnnnnnnnnnnnnnnnnnnnnnnnnnnnnnnnnnnnnnnnnnnnnnnnnnnnnnnnnnnnnnnnnnnnnnnnnnnnnnnnnnnnnnnnnnnnnnnnnnnnnnnnnnnnnnnnnnnnnnnnnnnnnnnnnnnnnnnnnnnnnnnnnnnnnnnnnnnnnnnnnnnnnnnnnnnnnnnnnnnnnnnnnnnnnnnnnnnnnnnnnnnnnnnnnnnnnnnnnnnnnnnnnnnnnnnnnnnnnnnnnnnnnnnnnnnnnnnnnnnnnnnnnnnnnnnnnnnnnnnnnnnnnnnnnnnnnnnnnnnnnnnnnnnnnnnnnnnnnnnnnnnnnnnnnnnnnnnnnnnnnnnnnnnnnnnnnnnnnnnnnnnnnnnnnnnnnnnnnnnnnnnnnnnnnnnnnnnnnnnnnnnnnnnnnnnnnnnnnnnnnnnnnnnnnnnnnnnnnnnnnnnnnnnnnnnnnnnnnnnnnnnnnnnnnnnnnnnnnnnnnnnnnnnnnnnnnnnnnnnnnnnnnnnnnnnnnnnnnnnnnnnnnnnnnnnnnnnnnnnnnnnnnnnnnnnnnnnnnnnnnnnnnnnnnnnnnnnnnnnnnnnnnnnnnnnnnnnnnnnnnnnnnnnnnnnnnnnnnnnnnnnnnnnnnnnnnnnnnnnnnnnnnnnnnnnnnnnnnnnnnnnnnnnnnnnnnnnnnnnnnnnnnnnnnnnnnnnnnnnnnnnnnnnnnnnnnnnnnnnnnnnnnnnnnnnnnnnnnnnnnnnnnnnnnnnnnnnnnnnnnnnnnnnnnnnnnnnnnnnnnnnnnnnnnnnnnnnnnnnnnnnnnnnnnnnnnnnnnnnnnnnnnnnnnnnnnnnnnnnnnnnnnnnnnnnnnnnnnnnnnnnnnnnnnnnnnnnnnnnnnnnnnnnnnnnnnnnnnnnnnnnnnnnnnnnnnnnnnnnnnnnnnnnnnnnnnnnnnnnnnnnnnnnnnnnnnnnnnnnnnnnnnnnnnnnnnnnnnnnnnnnnnnnnnnnnnnnnnnnnnnnnnnnnnnnnnnnnnnnnnnnnnnnnnnnnnnnnnnnnnnnnnnnnnnnnnnnnnnnnnnnnnnnnnnnnnnnnnnnnnnnnnnnnnnnnnnnnnnnnnnnnnnnnnnnnnnnnnnnnnnnnnnnnnnnnnnnnnnnnnnnnnnnnnnnnnnnnnnnnnnnnnnnnnnnnnnnnnnnnnnnnnnnnnnnnnnnnnnnnnnnnnnnnnnnnnnnnnnnnnnnnnnnnnnnnnnnnnnnnnnnnnnnnnnnnnnnnnnnnnnnnnnnnnnnnnnnnnnnnnnnnnnnnnnnnnnnnnnnnnnnnnnnnnnnnnnnnnnnnnnnnnnnnnnnnnnnnnnnnnnnnnnnnnnnnnnnnnnnnnnnnnnnnnnnnnnnnnnnnnnnnnnnnnnnnnnnnnnnnnnnnnnnnnnnnnnnnnnnnnnnnnnnnnnnnnnnnnnnnnnnnnnnnnnnnnnnnnnnnnnnnnnnnnnnnnnnnnnnnnnnnnnnnnnnnnnnnnnnnnnnnnnnnnnnnnnnnnnnnnnnnnnnnnnnnnnnnnnnnnnnnnnnnnnnnnnnnnnnnnnnnnnnnnnnnnnnnnnnnnnnnnnnnnnnnnnnnnnnnnnnnnnnnnnnnnnnnnnnnnnnnnnnnnnnnnnnnnnnnnnnnnnnnnnnnnnnnnnnnnnnnnnnnnnnnnnnnnnnnnnnnnnnnnnnnnnnnnnnnnnnnnnnnnnnnnnnnnnnnnnnnnnnnnnnnnnnnnnnnnnnnnnnnnnnnnnnnnnnnnnnnnnnnnnnnnnnnnnnnnnnnnnnnnnnnnnnnnnnnnnnnnnnnnnnnnnnnnnnnnnnnnnnnnnnnnnnnnnnnnnnnnnnnnnnnnnnnnnnnnnnnnnnnnnnnnnnnnnnnnnnnnnnnnnnnnnnnnnnnnnnnnnnnnnnnnnnnnnnnnnnnnnnnnnnnnnnnnnnnnnnnnnnnnnnnnnnnnnnnnnnnnnnnnnnnnnnnnnnnnnnnnnnnnnnnnnnnnnnnnnnnnnnnnnnnnnnnnnnnnnnnnnnnnnnnnnnnnnnnnnnnnnnnnnnnnnnnnnnnnnnnnnnnnnnnnnnnnnnnnnnnnnnnnnnnnnnnnnnnnnnnnnnnnnnnnnnnnnnnnnnnnnnnnnnnnnnnnnnnnnnnnnnnnnnnnnnnnnnnnnnnnnnnnnnnnnnnnnnnnnnnnnnnnnnnnnnnnnnnnnnnnnnnnnnnnnnnnnnnnnnnnnnnnnnnnnnnnnnnnnnnnnnnnnnnnnnnnnnnnnnnnnnnnnnnnnnnnnnnnnnnnnnnnnnnnnnnnnnnnnnnnnnnnnnnnnnnnnnnnnnnnnnnnnnnnnnnnnnnnnnnnnnnnnnnnnnnnnnnnnnnnnnnnnnnnnnnnnnnnnnnnnnnnnnnnnnnnnnnnnnnnnnnnnnnnnnnnnnnnnnnnnnnnnnnnnnnnnnnnnnnnnnnnnnnnnnnnnnnnnnnnnnnnnnnnnnnnnnnnnnnnnnnnnnnnnnnnnnnnnnnnnnnnnnnnnnnnnnnnnnnnnnnnnnnnnnnnnnnnnnnnnnnnnnnnnnnnnnnnnnnnnnnnnnnnnnnnnnnnnnnnnnnnnnnnnnnnnnnnnnnnnnnnnnnnnnnnnnnnnnnnnnnnnnnnnnnnnnnnnnnnnnnnnnnnnnnnnnnnnnnnnnnnnnnnnnnnnnnnnnnnnnnnnnnnnnnnnnnnnnnnnnnnnnnnnnnnnnnnnnnnnnnnnnnnnnnnnnnnnnnnnnnnnnnnnnnnnnnnnnnnnnnnnnnnnnnnnnnnnnnnnnnnnnnnnnnnnnnnnnnnnnnnnnnnnnnnnnnnnnnnnnnnnnnnnnnnnnnnnnnnnnnnnnnnnnnnnnnnnnnnnnnnnnnnnnnnnnnnnnnnnnnnnnnnnnnnnnnnnnnnnnnnnnnnnnnnnnnnnnnnnnnnnnnnnnnnnnnnnnnnnnnnnnnnnnnnnnnnnnnnnnnnnnnnnnnnnnnnnnnnnnnnnnnnnnnnnnnnnnnnnnnnnnnnnnnnnnnnnnnnnnnnnnnnnnnnnnnnnnnnnnnnnnnnnnnnnnnnnnnnnnnnnnnnnnnnnnnnnnnnnnnnnnnnnnnnnnnnnnnnnnnnnnnnnnnnnnnnnnnnnnnnnnnnnnnnnnnnnnnnnnnnnnnnnnnnnnnnnnnnnnnnnnnnnnnnnnnnnnnnnnnnnnnnnnnnnnnnnnnnnnnnnnnnnnnnnnnnnnnnnnnnnnnnnnnnnnnnnnnnnnnnnnnnnnnnnnnnnnnnnnnnnnnnnnnnnnnnnnnnnnnnnnnnnnnnnnnnnnnnnnnnnnnnnnnnnnnnnnnnnnnnnnnnnnnnnnnnnnnnnnnnnnnnnnnnnnnnnnnnnnnnnnnnnnnnnnnnnnnnnnnnnnnnnnnnnnnnnnnnnnnnnnnnnnnnnnnnnnnnnnnnnnnnnnnnnnnnnnnnnnnnnnnnnnnnnnnnnnnnnnnnnnnnnnnnnnnnnnnnnnnnnnnnnnnnnnnnnnnnnnnnnnnnnnnnnnnnnnnnnnnnnnnnnnnnnnnnnnnnnnnnnnnnnnnnnnnnnnnnnnnnnnnnnnnnnnnnnnnnnnnnnnnnnnnnnnnnnnnnnnnnnnnnnnnnnnnnnnnnnnnnnnnnnnnnnnnnnnnnnnnnnnnnnnnnnnnnnnnnnnnnnnnnnnnnnnnnnnnnnnnnnnnnnnnnnnnnnnnnnnnnnnnnnnnnnnnnnnnnnnnnnnnnnnnnnnnnnnnnnnnnnnnnnnnnnnnnnnnnnnnnnnnnnnnnnnnnnnnnnnnnnnnnnnnnnnnnnnnnnnnnnnnnnnnnnnnnnnnnnnnnnnnnnnnnnnnnnnnnnnnnnnnnnnnnnnnnnnnnnnnnnnnnnnnnnnnnnnnnnnnnnnnnnnnnnnnnnnnnnnnnnnnnnnnnnnnnnnnnnnnnnnnnnnnnnnnnnnnnnnnnnnnnnnnnnnnnnnnnnnnnnnnnnnnnnnnnnnnnnnnnnnnnnnnnnnnnnnnnnnnnnnnnnnnnnnnnnnnnnnnnnnnnnnnnnnnnnnnnnnnnnnnnnnnnnnnnnnnnnnnnnnnnnnnnnnnnnnnnnnnnnnnnnnnnnnnnnnnnnnnnnnnnnnnnnnnnnnnnnnnnnnnnnnnnnnnnnnnnnnnnnnnnnnnnnnnnnnnnnnnnnnnnnnnnnnnnnnnnnnnnnnnnnnnnnnnnnnnnnnnnnnnnnnnnnnnnnnnnnnnnnnnnnnnnnnnnnnnnnnnnnnnnnnnnnnnnnnnnnnnnnnnnnnnnnnnnnnnnnnnnnnnnnnnnnnnnnnnnnnnnnnnnnnnnnnnnnnnnnnnnnnnnnnnnnnnnnnnnnnnnnnnnnnnnnnnnnnnnnnnnnnnnnnnnnnnnnnnnnnnnnnnnnnnnnnnnnnnnnnnnnnnnnnnnnnnnnnnnnnnnnnnnnnnnnnnnnnnnnnnnnnnnnnnnnnnnnnnnnnnnnnnnnnnnnnnnnnnnnnnnnnnnnnnnnnnnnnnnnnnnnnnnnnnnnnnnnnnnnnnnnnnnnnnnnnnnnnnnnnnnnnnnnnnnnnnnnnnnnnnnnnnnnnnnnnnnnnnnnnnnnnnnnnnnnnnnnnnnnnnnnnnnnnnnnnnnnnnnnnnnnnnnnnnnnnnnnnnnnnnnnnnnnnnnnnnnnnnnnnnnnnnnnnnnnnnnnnnnnnnnnnnnnnnnnnnnnnnnnnnnnnnnnnnnnnnnnnnnnnnnnnnnnnnnnnnnnnnnnnnnnnnnnnnnnnnnnnnnnnnnnnnnnnnnnnnnnnnnnnnnnnnnnnnnnnnnnnnnnnnnnnnnnnnnnnnnnnnnnnnnnnnnnnnnnnnnnnnnnnnnnnnnnnnnnnnnnnnnnnnnnnnnnnnnnnnnnnnnnnnnnnnnnnnnnnnnnnnnnnnnnnnnnnnnnnnnnnnnnnnnnnnnnnnnnnnnnnnnnnnnnnnnnnnnnnnnnnnnnnnnnnnnnnnnnnnnnnnnnnnnnnnnnnnnnnnnnnnnnnnnnnnnnnnnnnnnnnnnnnnnnnnnnnnnnnnnnnnnnnnnnnnnnnnnnnnnnnnnnnnnnnnnnnnnnnnnnnnnnnnnnnnnnnnnnnnnnnnnnnnnnnnnnnnnnnnnnnnnnnnnnnnnnnnnnnnnnnnnnnnnnnnnnnnnnnnnnnnnnnnnnnnnnnnnnnnnnnnnnnnnnnnnnnnnnnnnnnnnnnnnnnnnnnnnnnnnnnnnnnnnnnnnnnnnnnnnnnnnnnnnnnnnnnnnnnnnnnnnnnnnnnnnnnnnnnnnnnnnnnnnnnnnnnnnnnnnnnnnnnnnnnnnnnnnnnnnnnnnnnnnnnnnnnnnnnnnnnnnnnnnnnnnnnnnnnnnnnnnnnnnnnnnnnnnnnnnnnnnnnnnnnnnnnnnnnnnnnnnnnnnnnnnnnnnnnnnnnnnnnnnnnnnnnnnnnnnnnnnnnnnnnnnnnnnnnnnnnnnnnnnnnnnnnnnnnnnnnnnnnnnnnnnnnnnnnnnnnnnnnnnnnnnnnnnnnnnnnnnnnnnnnnnnnnnnnnnnnnnnnnnnnnnnnnnnnnnnnnnnnnnnnnnnnnnnnnnnnnnnnnnnnnnnnnnnnnnnnnnnnnnnnnnnnnnnnnnnnnnnnnnnnnnnnnnnnnnnnnnnnnnnnnnnnnnnnnnnnnnnnnnnnnnnnnnnnnnnnnnnnnnnnnnnnnnnnnnnnnnnnnnnnnnnnnnnnnnnnnnnnnnnnnnnnnnnnnnnnnnnnnnnnnnnnnnnnnnnnnnnnnnnnnnnnnnnnnnnnnnnnnnnnnnnnnnnnnnnnnnnnnnnnnnnnnnnnnnnnnnnnnnnnnnnnnnnnnnnnnnnnnnnnnnnnnnnnnnnnnnnnnnnnnnnnnnnnnnnnnnnnnnnnnnnnnnnnnnnnnnnnnnnnnnnnnnnnnnnnnnnnnnnnnnnnnnnnnnnnnnnnnnnnnnnnnnnnnnnnnnnnnnnnnnnnnnnnnnnnnnnnnnnnnnnnnnnnnnnnnnnnnnnnnnnnnnnnnnnnnnnnnnnnnnnnnnnnnnnnnnnnnnnnnnnnnnnnnnnnnnnnnnnnnnnnnnnnnnnnnnnnnnnnnnnnnnnnnnnnnnnnnnnnnnnnnnnnnnnnnnnnnnnnnnnnnnnnnnnnnnnnnnnnnnnnnnnnnnnnnnnnnnnnnnnnnnnnnnnnnnnnnnnnnnnnnnnnnnnnnnnnnnnnnnnnnnnnnnnnnnnnnnnnnnnnnnnnnnnnnnnnnnnnnnnnnnnnnnnnnnnnnnnnnnnnnnnnnnnnnnnnnnnnnnnnnnnnnnnnnnnnnnnnnnnnnnnnnnnnnnnnnnnnnnnnnnnnnnnnnnnnnnnnnnnnnnnnnnnnnnnnnnnnnnnnnnnnnnnnnnnnnnnnnnnnnnnnnnnnnnnnnnnnnnnnnnnnnnnnnnnnnnnnnnnnnnnnnnnnnnnnnnnnnnnnnnnnnnnnnnnnnnnnnnnnnnnnnnnnnnnnnnnnnnnnnnnnnnnnnnnnnnnnnnnnnnnnnnnnnnnnnnnnnnnnnnnnnnnnnnnnnnnnnnnnnnnnnnnnnnnnnnnnnnnnnnnnnnnnnnnnnnnnnnnnnnnnnnnnnnnnnnnnnnnnnnnnnnnnnnnnnnnnnnnnnnnnnnnnnnnnnnnnnnnnnnnnnnnnnnnnnnnnnnnnnnnnnnnnnnnnnnnnnnnnnnnnnnnnnnnnnnnnnnnnnnnnnnnnnnnnnnnnnnnnnnnnnnnnnnnnnnnnnnnnnnnnnnnnnnnnnnnnnnnnnnnnnnnnnnnnnnnnnnnnnnnnnnnnnnnnnnnnnnnnnnnnnnnnnnnnnnnnnnnnnnnnnnnnnnnnnnnnnnnnnnnnnnnnnnnnnnnnnnnnnnnnnnnnnnnnnnnnnnnnnnnnnnnnnnnnnnnnnnnnnnnnnnnnnnnnnnnnnnnnnnnnnnnnnnnnnnnnnnnnnnnnnnnnnnnnnnnnnnnnnnnnnnnnnnnnnnnnnnnnnnnnnnnnnnnnnnnnnnnnnnnnnnnnnnnnnnnnnnnnnnnnnnnnnnnnnnnnnnnnnnnnnnnnnnnnnnnnnnnnnnnnnnnnnnnnnnnnnnnnnnnnnnnnnnnnnnnnnnnnnnnnnnnnnnnnnnnnnnnnnnnnnnnnnnnnnnnnnnnnnnnnnnnnnnnnnnnnnnnnnnnnnnnnnnnnnnnnnnnnnnnnnnnnnnnnnnnnnnnnnnnnnnnnnnnnnnnnnnnnnnnnnnnnnnnnnnnnnnnnnnnnnnnnnnnnnnnnnnnnnnnnnnnnnnnnnnnnnnnnnnnnnnnnnnnnnnnnnnnnnnnnnnnnnnnnnnnnnnnnnnnnnnnnnnnnnnnnnnnnnnnnnnnnnnnnnnnnnnnnnnnnnnnnnnnnnnnnnnnnnnnnnnnnnnnnnnnnnnnnnnnnnnnnnnnnnnnnnnnnnnnnnnnnnnnnnnnnnnnnnnnnnnnnnnnnnnnnnnnnnnnnnnnnnnnnnnnnnnnnnnnnnnnnnnnnnnnnnnnnnnnnnnnnnnnnnnnnnnnnnnnnnnnnnnnnnnnnnnnnnnnnnnnnnnnnnnnnnnnnnnnnnnnnnnnnnnnnnnnnnnnnnnnnnnnnnnnnnnnnnnnnnnnnnnnnnnnnnnnnnnnnnnnnnnnnnnnnnnnnnnnnnnnnnnnnnnnnnnnnnnnnnnnnnnnnnnnnnnnnnnnnnnnnnnnnnnnnnnnnnnnnnnnnnnnnnnnnnnnnnnnnnnnnnnnnnnnnnnnnnnnnnnnnnnnnnnnnnnnnnnnnnnnnnnnnnnnnnnnnnnnnnnnnnnnnnnnnnnnnnnnnnnnnnnnnnnnnnnnnnnnnnnnnnnnnnnnnnnnnnnnnnnnnnnnnnnnnnnnnnnnnnnnnnnnnnnnnnnnnnnnnnnnnnnnnnnnnnnnnnnnnnnnnnnnnnnnnnnnnnnnnnnnnnnnnnnnnnnnnnnnnnnnnnnnnnnnnnnnnnnnnnnnnnnnnnnnnnnnnnnnnnnnnnnnnnnnnnnnnnnnnnnnnnnnnnnnnnnnnnnnnnnnnnnnnnnnnnnnnnnnnnnnnnnnnnnnnnnnnnnnnnnnnnnnnnnnnnnnnnnnnnnnnnnnnnnnnnnnnnnnnnnnnnnnnnnnnnnnnnnnnnnnnnnnnnnnnnnnnnnnnnnnnnnnnnnnnnnnnnnnnnnnnnnnnnnnnnnnnnnnnnnnnnnnnnnnnnnnnnnnnnnnnnnnnnnnnnnnnnnnnnnnnnnnnnnnnnnnnnnnnnnnnnnnnnnnnnnnnnnnnnnnnnnnnnnnnnnnnnnnnnnnnnnnnnnnnnnnnnnnnnnnnnnnnnnnnnnnnnnnnnnnnnnnnnnnnnnnnnnnnnnnnnnnnnnnnnnnnnnnnnnnnnnnnnnnnnnnnnnnnnnnnnnnnnnnnnnnnnnnnnnnnnnnnnnnnnnnnnnnnnnnnnnnnnnnnnnnnnnnnnnnnnnnnnnnnnnnnnnnnnnnnnnnnnnnnnnnnnnnnnnnnnnnnnnnnnnnnnnnnnnnnnnnnnnnnnnnnnnnnnnnnnnnnnnnnnnnnnnnnnnnnnnnnnnnnnnnnnnnnnnnnnnnnnnnnnnnnnnnnnnnnnnnnnnnnnnnnnnnnnnnnnnnnnnnnnnnnnnnnnnnnnnnnnnnnnnnnnnnnnnnnnnnnnnnnnnnnnnnnnnnnnnnnnnnnnnnnnnnnnnnnnnnnnnnnnnnnnnnnnnnnnnnnnnnnnnnnnnnnnnnnnnnnnnnnnnnnnnnnnnnnnnnnnnnnnnnnnnnnnnnnnnnnnnnnnnnnnnnnnnnnnnnnnnnnnnnnnnnnnnnnnnnnnnnnnnnnnnnnnnnnnnnnnnnnnnnnnnnnnnnnnnnnnnnnnnnnnnnnnnnnnnnnnnnnnnnnnnnnnnnnnnnnnnnnnnnnnnnnnnnnnnnnnnnnnnnnnnnnnnnnnnnnnnnnnnnnnnnnnnnnnnnnnnnnnnnnnnnnnnnnnnnnnnnnnnnnnnnnnnnnnnnnnnnnnnnnnnnnnnnnnnnnnnnnnnnnnnnnnnnnnnnnnnnnnnnnnnnnnnnnnnnnnnnnnnnnnnnnnnnnnnnnnnnnnnnnnnnnnnnnnnnnnnnnnnnnnnnnnnnnnnnnnnnnnnnnnnnnnnnnnnnnnnnnnnnnnnnnnnnnnnnnnnnnnnnnnnnnnnnnnnnnnnnnnnnnnnnnnnnnnnnnnnnnnnnnnnnnnnnnnnnnnnnnnnnnnnnnnnnnnnnnnnnnnnnnnnnnnnnnnnnnnnnnnnnnnnnnnnnnnnnnnnnnnnnnnnnnnnnnnnnnnnnnnnnnnnnnnnnnnnnnnnnnnnnnnnnnnnnnnnnnnnnnnnnnnnnnnnnnnnnnnnnnnnnnnnnnnnnnnnnnnnnnnnnnnnnnnnnnnnnnnnnnnnnnnnnnnnnnnnnnnnnnnnnnnnnnnnnnnnnnnnnnnnnnnnnnnnnnnnnnnnnnnnnnnnnnnnnnnnnnnnnnnnnnnnnnnnnnnnnnnnnnnnnnnnnnnnnnnnnnnnnnnnnnnnnnnnnnnnnnnnnnnnnnnnnnnnnnnnnnnnnnnnnnnnnnnnnnnnnnnnnnnnnnnnnnnnnnnnnnnnnnnnnnnnnnnnnnnnnnnnnnnnnnnnnnnnnnnnnnnnnnnnnnnnnnnnnnnnnnnnnnnnnnnnnnnnnnnnnnnnnnnnnnnnnnnnnnnnnnnnnnnnnnnnnnnnnnnnnnnnnnnnnnnnnnnnnnnnnnnnnnnnnnnnnnnnnnnnnnnnnnnnnnnnnnnnnnnnnnnnnnnnnnnnnnnnnnnnnnnnnnnnnnnnnnnnnnnnnnnnnnnnnnnnnnnnnnnnnnnnnnnnnnnnnnnnnnnnnnnnnnnnnnnnnnnnnnnnnnnnnnnnnnnnnnnnnnnnnnnnnnnnnnnnnnnnnnnnnnnnnnnnnnnnnnnnnnnnnnnnnnnnnnnnnnnnnnnnnnnnnnnnnnnnnnnnnnnnnnnnnnnnnnnnnnnnnnnnnnnnnnnnnnnnnnnnnnnnnnnnnnnnnnnnnnnnnnnnnnnnnnnnnnnnnnnnnnnnnnnnnnnnnnnnnnnnnnnnnnnnnnnnnnnnnnnnnnnnnnnnnnnnnnnnnnnnnnnnnnnnnnnnnnnnnnnnnnnnnnnnnnnnnnnnnnnnnnnnnnnnnnnnnnnnnnnnnnnnnnnnnnnnnnnnnnnnnnnnnnnnnnnnnnnnnnnnnnnnnnnnnnnnnnnnnnnnnnnnnnnnnnnnnnnnnnnnnnnnnnnnnnnnnnnnnnnnnnnnnnnnnnnnnnnnnnnnnnnnnnnnnnnnnnnnnnnnnnnnnnnnnnnnnnnnnnnnnnnnnnnnnnnnnnnnnnnnnnnnnnnnnnnnnnnnnnnnnnnnnnnnnnnnnnnnnnnnnnnnnnnnnnnnnnnnnnnnnnnnnnnnnnnnnnnnnnnnnnnnnnnnnnnnnnnnnnnnnnnnnnnnnnnnnnnnnnnnnnnnnnnnnnnnnnnnnnnnnnnnnnnnnnnnnnnnnnnnnnnnnnnnnnnnnnnnnnnnnnnnnnnnnnnnnnnnnnnnnnnnnnnnnnnnnnnnnnnnnnnnnnnnnnnnnnnnnnnnnnnnnnnnnnnnnnnnnnnnnnnnnnnnnnnnnnnnnnnnnnnnnnnnnnnnnnnnnnnnnnnnnnnnnnnnnnnnnnnnnnnnnnnnnnnnnnnnnnnnnnnnnnnnnnnnnnnnnnnnnnnnnnnnnnnnnnnnnnnnnnnnnnnnnnnnnnnnnnnnnnnnnnnnnnnnnnnnnnnnnnnnnnnnnnnnnnnnnnnnnnnnnnnnnnnnnnnnnnnnnnnnnnnnnnnnnnnnnnnnnnnnnnnnnnnnnnnnnnnnnnnnnnnnnnnnnnnnnnnnnnnnnnnnnnnnnnnnnnnnnnnnnnnnnnnnnnnnnnnnnnnnnnnnnnnnnnnnnnnnnnnnnnnnnnnnnnnnnnnnnnnnnnnnnnnnnnnnnnnnnnnnnnnnnnnnnnnnnnnnnnnnnnnnnnnnnnnnnnnnnnnnnnnnnnnnnnnnnnnnnnnnnnnnnnnnnnnnnnnnnnnnnnnnnnnnnnnnnnnnnnnnnnnnnnnnnnnnnnnnnnnnnnnnnnnnnnnnnnnnnnnnnnnnnnnnnnnnnnnnnnnnnnnnnnnnnnnnnnnnnnnnnnnnnnnnnnnnnnnnnnnnnnnnnnnnnnnnnnnnnnnnnnnnnnnnnnnnnnnnnnnnnnnnnnnnnnnnnnnnnnnnnnnnnnnnnnnnnnnnnnnnnnnnnnnnnnnnnnnnnnnnnnnnnnnnnnnnnnnnnnnnnnnnnnnnnnnnnnnnnnnnnnnnnnnnnnnnnnnnnnnnnnnnnnnnnnnnnnnnnnnnnnnnnnnnnnnnnnnnnnnnnnnnnnnnnnnnnnnnnnnnnnnnnnnnnnnnnnnnnnnnnnnnnnnnnnnnnnnnnnnnnnnnnnnnnnnnnnnnnnnnnnnnnnnnnnnnnnnnnnnnnnnnnnnnnnnnnnnnnnnnnnnnnnnnnnnnnnnnnnnnnnnnnnnnnnnnnnnnnnnnnnnnnnnnnnnnnnnnnnnnnnnnnnnnnnnnnnnnnnnnnnnnnnnnnnnnnnnnnnnnnnnnnnnnnnnnnnnnnnnnnnnnnnnnnnnnnnnnnnnnnnnnnnnnnnnnnnnnnnnnnnnnnnnnnnnnnnnnnnnnnnnnnnnnnnnnnnnnnnnnnnnnnnnnnnnnnnnnnnnnnnnnnnnnnnnnnnnnnnnnnnnnnnnnnnnnnnnnnnnnnnnnnnnnnnnnnnnnnnnnnnnnnnnnnnnnnnnnnnnnnnnnnnnnnnnnnnnnnnnnnnnnnnnnnnnnnnnnnnnnnnnnnnnnnnnnnnnnnnnnnnnnnnnnnnnnnnnnnnnnnnnnnnnnnnnnnnnnnnnnnnnnnnnnnnnnnnnnnnnnnnnnnnnnnnnnnnnnnnnnnnnnnnnnnnnnnnnnnnnnnnnnnnnnnnnnnnnnnnnnnnnnnnnnnnnnnnnnnnnnnnnnnnnnnnnnnnnnnnnnnnnnnnnnnnnnnnnnnnnnnnnnnnnnnnnnnnnnnnnnnnnnnnnnnnnnnnnnnnnnnnnnnnnnnnnnnnnnnnnnnnnnnnnnnnnnnnnnnnnnnnnnnnnnnnnnnnnnnnnnnnnnnnnnnnnnnnnnnnnnnnnnnnnnnnnnnnnnnnnnnnnnnnnnnnnnnnnnnnnnnnnnnnnnnnnnnnnnnnnnnnnnnnnnnnnnnnnnnnnnnnnnnnnnnnnnnnnnnnnnnnnnnnnnnnnnnnnnnnnnnnnnnnnnnnnnnnnnnnnnnnnnnnnnnnnnnnnnnnnnnnnnnnnnnnnnnnnnnnnnnnnnnnnnnnnnnnnnnnnnnnnnnnnnnnnnnnnnnnnnnnnnnnnnnnnnnnnnnnnnnnnnnnnnnnnnnnnnnnnnnnnnnnnnnnnnnnnnnnnnnnnnnnnnnnnnnnnnnnnnnnnnnnnnnnnnnnnnnnnnnnnnnnnnnnnnnnnnnnnnnnnnnnnnnnnnnnnnnnnnnnnnnnnnnnnnnnnnnnnnnnnnnnnnnnnnnnnnnnnnnnnnnnnnnnnnnnnnnnnnnnnnnnnnnnnnnnnnnnnnnnnnnnnnnnnnnnnnnnnnnnnnnnnnnnnnnnnnnnnnnnnnnnnnnnnnnnnnnnnnnnnnnnnnnnnnnnnnnnnnnnnnnnnnnnnnnnnnnnnnnnnnnnnnnnnnnnnnnnnnnnnnnnnnnnnnnnnnnnnnnnnnnnnnnnnnnnnnnnnnnnnnnnnnnnnnnnnnnnnnnnnnnnnnnnnnnnnnnnnnnnnnnnnnnnnnnnnnnnnnnnnnnnnnnnnnnnnnnnnnnnnnnnnnnnnnnnnnnnnnnnnnnnnnnnnnnnnnnnnnnnnnnnnnnnnnnnnnnnnnnnnnnnnnnnnnnnnnnnnnnnnnnnnnnnnnnnnnnnnnnnnnnnnnnnnnnnnnnnnnnnnnnnnnnnnnnnnnnnnnnnnnnnnnnnnnnnnnnnnnnnnnnnnnnnnnnnnnnnnnnnnnnnnnnnnnnnnnnnnnnnnnnnnnnnnnnnnnnnnnnnnnnnnnnnnnnnnnnnnnnnnnnnnnnnnnnnnnnnnnnnnnnnnnnnnnnnnnnnnnnnnnnnnnnnnnnnnnnnnnnnnnnnnnnnnnnnnnnnnnnnnnnnnnnnnnnnnnnnnnnnnnnnnnnnnnnnnnnnnnnnnnnnnnnnnnnnnnnnnnnnnnnnnnnnnnnnnnnnnnnnnnnnnnnnnnnnnnnnnnnnnnnnnnnnnnnnnnnnnnnnnnnnnnnnnnnnnnnnnnnnnnnnnnnnnnnnnnnnnnnnnnnnnnnnnnnnnnnnnnnnnnnnnnnnnnnnnnnnnnnnnnnnnnnnnnnnnnnnnnnnnnnnnnnnnnnnnnnnnnnnnnnnnnnnnnnnnnnnnnnnnnnnnnnnnnnnnnnnnnnnnnnnnnnnnnnnnnnnnnnnnnnnnnnnnnnnnnnnnnnnnnnnnnnnnnnnnnnnnnnnnnnnnnnnnnnnnnnnnnnnnnnnnnnnnnnnnnnnnnnnnnnnnnnnnnnnnnnnnnnnnnnnnnnnnnnnnnnnnnnnnnnnnnnnnnnnnnnnnnnnnnnnnnnnnnnnnnnnnnnnnnnnnnnnnnnnnnnnnnnnnnnnnnnnnnnnnnnnnnnnnnnnnnnnnnnnnnnnnnnnnnnnnnnnnnnnnnnnnnnnnnnnnnnnnnnnnnnnnnnnnnnnnnnnnnnnnnnnnnnnnnnnnnnnnnnnnnnnnnnnnnnnnnnnnnnnnnnnnnnnnnnnnnnnnnnnnnnnnnnnnnnnnnnnnnnnnnnnnnnnnnnnnnnnnnnnnnnnnnnnnnnnnnnnnnnnnnnnnnnnnnnnnnnnnnnnnnnnnnnnnnnnnnnnnnnnnnnnnnnnnnnnnnnnnnnnnnnnnnnnnnnnnnnnnnnnnnnnnnnnnnnnnnnnnnnnnnnnnnnnnnnnnnnnnnnnnnnnnnnnnnnnnnnnnnnnnnnnnnnnnnnnnnnnnnnnnnnnnnnnnnnnnnnnnnnnnnnnnnnnnnnnnnnnnnnnnnnnnnnnnnnnnnnnnnnnnnnnnnnnnnnnnnnnnnnnnnnnnnnnnnnnnnnnnnnnnnnnnnnnnnnnnnnnnnnnnnnnnnnnnnnnnnnnnnnnnnnnnnnnnnnnnnnnnnnnnnnnnnnnnnnnnnnnnnnnnnnnnnnnnnnnnnnnnnnnnnnnnnnnnnnnnnnnnnnnnnnnnnnnnnnnnnnnnnnnnnnnnnnnnnnnnnnnnnnnnnnnnnnnnnnnnnnnnnnnnnnnnnnnnnnnnnnnnnnnnnnnnnnnnnnnnnnnnnnnnnnnnnnnnnnnnnnnnnnnnnnnnnnnnnnnnnnnnnnnnnnnnnnnnnnnnnnnnnnnnnnnnnnnnnnnnnnnnnnnnnnnnnnnnnnnnnnnnnnnnnnnnnnnnnnnnnnnnnnnnnnnnnnnnnnnnnnnnnnnnnnnnnnnnnnnnnnnnnnnnnnnnnnnnnnnnnnnnnnnnnnnnnnnnnnnnnnnnnnnnnnnnnnnnnnnnnnnnnnnnnnnnnnnnnnnnnnnnnnnnnnnnnnnnnnnnnnnnnnnnnnnnnnnnnnnnnnnnnnnnnnnnnnnnnnnnnnnnnnnnnnnnnnnnnnnnnnnnnnnnnnnnnnnnnnnnnnnnnnnnnnnnnnnnnnnnnnnnnnnnnnnnnnnnnnnnnnnnnnnnnnnnnnnnnnnnnnnnnnnnnnnnnnnnnnnnnnnnnnnnnnnnnnnnnnnnnnnnnnnnnnnnnnnnnnnnnnnnnnnnnnnnnnnnnnnnnnnnnnnnnnnnnnnnnnnnnnnnnnnnnnnnnnnnnnnnnnnnnnnnnnnnnnnnnnnnnnnnnnnnnnnnnnnnnnnnnnnnnnnnnnnnnnnnnnnnnnnnnnnnnnnnnnnnnnnnnnnnnnnnnnnnnnnnnnnnnnnnnnnnnnnnnnnnnnnnnnnnnnnnnnnnnnnnnnnnnnnnnnnnnnnnnnnnnnnnnnnnnnnnnnnnnnnnnnnnnnnnnnnnnnnnnnnnnnnnnnnnnnnnnnnnnnnnnnnnnnnnnnnnnnnnnnnnnnnnnnnnnnnnnnnnnnnnnnnnnnnnnnnnnnnnnnnnnnnnnnnnnnnnnnnnnnnnnnnnnnnnnnnnnnnnnnnnnnnnnnnnnnnnnnnnnnnnnnnnnnnnnnnnnnnnnnnnnnnnnnnnnnnnnnnnnnnnnnnnnnnnnnnnnnnnnnnnnnnnnnnnnnnnnnnnnnnnnnnnnnnnnnnnnnnnnnnnnnnnnnnnnnnnnnnnnnnnnnnnnnnnnnnnnnnnnnnnnnnnnnnnnnnnnnnnnnnnnnnnnnnnnnnnnnnnnnnnnnnnnnnnnnnnnnnnnnnnnnnnnnnnnnnnnnnnnnnnnnnnnnnnnnnnnnnnnnnnnnnnnnnnnnnnnnnnnnnnnnnnnnnnnnnnnnnnnnnnnnnnnnnnnnnnnnnnnnnnnnnnnnnnnnnnnnnnnnnnnnnnnnnnnnnnnnnnnnnnnnnnnnnnnnnnnnnnnnnnnnnnnnnnnnnnnnnnnnnnnnnnnnnnnnnnnnnnnnnnnnnnnnnnnnnnnnnnnnnnnnnnnnnnnnnnnnnnnnnnnnnnnnnnnnnnnnnnnnnnnnnnnnnnnnnnnnnnnnnnnnnnnnnnnnnnnnnnnnnnnnnnnnnnnnnnnnnnnnnnnnnnnnnnnnnnnnnnnnnnnnnnnnnnnnnnnnnnnnnnnnnnnnnnnnnnnnnnnnnnnnnnnnnnnnnnnnnnnnnnnnnnnnnnnnnnnnnnnnnnnnnnnnnnnnnnnnnnnnnnnnnnnnnnnnnnnnnnnnnnnnnnnnnnnnnnnnnnnnnnnnnnnnnnnnnnnnnnnnnnnnnnnnnnnnnnnnnnnnnnnnnnnnnnnnnnnnnnnnnnnnnnnnnnnnnnnnnnnnnnnnnnnnnnnnnnnnnnnnnnnnnnnnnnnnnnnnnnnnnnnnnnnnnnnnnnnnnnnnnnnnnnnnnnnnnnnnnnnnnnnnnnnnnnnnnnnnnnnnnnnnnnnnnnnnnnnnnnnnnnnnnnnnnnnnnnnnnnnnnnnnnnnnnnnnnnnnnnnnnnnnnnnnnnnnnnnnnnnnnnnnnnnnnnnnnnnnnnnnnnnnnnnnnnnnnnnnnnnnnnnnnnnnnnnnnnnnnnnnnnnnnnnnnnnnnnnnnnnnnnnnnnnnnnnnnnnnnnnnnnnnnnnnnnnnnnnnnnnnnnnnnnnnnnnnnnnnnnnnnnnnnnnnnnnnnnnnnnnnnnnnnnnnnnnnnnnnnnnnnnnnnnnnnnnnnnnnnnnnnnnnnnnnnnnnnnnnnnnnnnnnnnnnnnnnnnnnnnnnnnnnnnnnnnnnnnnnnnnnnnnnnnnnnnnnnnnnnnnnnnnnnnnnnnnnnnnnnnnnnnnnnnnnnnnnnnnnnnnnnnnnnnnnnnnnnnnnnnnnnnnnnnnnnnnnnnnnnnnnnnnnnnnnnnnnnnnnnnnnnnnnnnnnnnnnnnnnnnnnnnnnnnnnnnnnnnnnnnnnnnnnnnnnnnnnnnnnnnnnnnnnnnnnnnnnnnnnnnnnnnnnnnnnnnnnnnnnnnnnnnnnnnnnnnnnnnnnnnnnnnnnnnnnnnnnnnnnnnnnnnnnnnnnnnnnnnnnnnnnnnnnnnnnnnnnnnnnnnnnnnnnnnnnnnnnnnnnnnnnnnnnnnnnnnnnnnnnnnnnnnnnnnnnnnnnnnnnnnnnnnnnnnnnnnnnnnnnnnnnnnnnnnnnnnnnnnnnnnnnnnnnnnnnnnnnnnnnnnnnnnnnnnnnnnnnnnnnnnnnnnnnnnnnnnnnnnnnnnnnnnnnnnnnnnnnnnnnnnnnnnnnnnnnnnnnnnnnnnnnnnnnnnnnnnnnnnnnnnnnnnnnnnnnnnnnnnnnnnnnnnnnnnnnnnnnnnnnnnnnnnnnnnnnnnnnnnnnnnnnnnnnnnnnnnnnnnnnnnnnnnnnnnnnnnnnnnnnnnnnnnnnnnnnnnnnnnnnnnnnnnnnnnnnnnnnnnnnnnnnnnnnnnnnnnnnnnnnnnnnnnnnnnnnnnnnnnnnnnnnnnnnnnnnnnnnnnnnnnnnnnnnnnnnnnnnnnnnnnnnnnnnnnnnnnnnnnnnnnnnnnnnnnnnnnnnnnnnnnnnnnnnnnnnnnnnnnnnnnnnnnnnnnnnnnnnnnnnnnnnnnnnnnnnnnnnnnnnnnnnnnnnnnnnnnnnnnnnnnnnnnnnnnnnnnnnnnnnnnnnnnnnnnnnnnnnnnnnnnnnnnnnnnnnnnnnnnnnnnnnnnnnnnnnnnnnnnnnnnnnnnnnnnnnnnnnnnnnnnnnnnnnnnnnnnnnnnnnnnnnnnnnnnnnnnnnnnnnnnnnnnnnnnnnnnnnnnnnnnnnnnnnnnnnnnnnnnnnnnnnnnnnnnnnnnnnnnnnnnnnnnnnnnnnnnnnnnnnnnnnnnnnnnnnnnnnnnnnnnnnnnnnnnnnnnnnnnnnnnnnnnnnnnnnnnnnnnnnnnnnnnnnnnnnnnnnnnnnnnnnnnnnnnnnnnnnnnnnnnnnnnnnnnnnnnnnnnnnnnnnnnnnnnnnnnnnnnnnnnnnnnnnnnnnnnnnnnnnnnnnnnnnnnnnnnnnnnnnnnnnnnnnnnnnnnnnnnnnnnnnnnnnnnnnnnnnnnnnnnnnnnnnnnnnnnnnnnnnnnnnnnnnnnnnnnnnnnnnnnnnnnnnnnnnnnnnnnnnnnnnnnnnnnnnnnnnnnnnnnnnnnnnnnnnnnnnnnnnnnnnnnnnnnnnnnnnnnnnnnnnnnnnnnnnnnnnnnnnnnnnnnnnnnnnnnnnnnnnnnnnnnnnnnnnnnnnnnnnnnnnnnnnnnnnnnnnnnnnnnnnnnnnnnnnnnnnnnnnnnnnnnnnnnnnnnnnnnnnnnnnnnnnnnnnnnnnnnnnnnnnnnnnnnnnnnnnnnnnnnnnnnnnnnnnnnnnnnnnnnnnnnnnnnnnnnnnnnnnnnnnnnnnnnnnnnnnnnnnnnnnnnnnnnnnnnnnnnnnnnnnnnnnnnnnnnnnnnnnnnnnnnnnnnnnnnnnnnnnnnnnnnnnnnnnnnnnnnnnnnnnnnnnnnnnnnnnnnnnnnnnnnnnnnnnnnnnnnnnnnnnnnnnnnnnnnnnnnnnnnnnnnnnnnnnnnnnnnnnnnnnnnnnnnnnnnnnnnnnnnnnnnnnnnnnnnnnnnnnnnnnnnnnnnnnnnnnnnnnnnnnnnnnnnnnnnnnnnnnnnnnnnnnnnnnnnnnnnnnnnnnnnnnnnnnnnnnnnnnnnnnnnnnnnnnnnnnnnnnnnnnnnnnnnnnnnnnnnnnnnnnnnnnnnnnnnnnnnnnnnnnnnnnnnnnnnnnnnnnnnnnnnnnnnnnnnnnnnnnnnnnnnnnnnnnnnnnnnnnnnnnnnnnnnnnnnnnnnnnnnnnnnnnnnnnnnnnnnnnnnnnnnnnnnnnnnnnnnnnnnnnnnnnnnnnnnnnnnnnnnnnnnnnnnnnnnnnnnnnnnnnnnnnnnnnnnnnnnnnnnnnnnnnnnnnnnnnnnnnnnnnnnnnnnnnnnnnnnnnnnnnnnnnnnnnnnnnnnnnnnnnnnnnnnnnnnnnnnnnnnnnnnnnnnnnnnnnnnnnnnnnnnnnnnnnnnnnnnnnnnnnnnnnnnnnnnnnnnnnnnnnnnnnnnnnnnnnnnnnnnnnnnnnnnnnnnnnnnnnnnnnnnnnnnnnnnnnnnnnnnnnnnnnnnnnnnnnnnnnnnnnnnnnnnnnnnnnnnnnnnnnnnnnnnnnnnnnnnnnnnnnnnnnnnnnnnnnnnnnnnnnnnnnnnnnnnnnnnnnnnnnnnnnnnnnnnnnnnnnnnnnnnnnnnnnnnnnnnnnnnnnnnnnnnnnnnnnnnnnnnnnnnnnnnnnnnnnnnnnnnnnnnnnnnnnnnnnnnnnnnnnnnnnnnnnnnnnnnnnnnnnnnnnnnnnnnnnnnnnnnnnnnnnnnnnnnnnnnnnnnnnnnnnnnnnnnnnnnnnnnnnnnnnnnnnnnnnnnnnnnnnnnnnnnnnnnnnnnnnnnnnnnnnnnnnnnnnnnnnnnnnnnnnnnnnnnnnnnnnnnnnnnnnnnnnnnnnnnnnnnnnnnnnnnnnnnnnnnnnnnnnnnnnnnnnnnnnnnnnnnnnnnnnnnnnnnnnnnnnnnnnnnnnnnnnnnnnnnnnnnnnnnnnnnnnnnnnnnnnnnnnnnnnnnnnnnnnnnnnnnnnnnnnnnnnnnnnnnnnnnnnnnnnnnnnnnnnnnnnnnnnnnnnnnnnnnnnnnnnnnnnnnnnnnnnnnnnnnnnnnnnnnnnnnnnnnnnnnnnnnnnnnnnnnnnnnnnnnnnnnnnnnnnnnnnnnnnnnnnnnnnnnnnnnnnnnnnnnnnnnnnnnnnnnnnnnnnnnnnnnnnnnnnnnnnnnnnnnnnnnnnnnnnnnnnnnnnnnnnnnnnnnnnnnnnnnnnnnnnnnnnnnnnnnnnnnnnnnnnnnnnnnnnnnnnnnnnnnnnnnnnnnnnnnnnnnnnnnnnnnnnnnnnnnnnnnnnnnnnnnnnnnnnnnnnnnnnnnnnnnnnnnnnnnnnnnnnnnnnnnnnnnnnnnnnnnnnnnnnnnnnnnnnnnnnnnnnnnnnnnnnnnnnnnnnnnnnnnnnnnnnnnnnnnnnnnnnnnnnnnnnnnnnnnnnnnnnnnnnnnnnnnnnnnnnnnnnnnnnnnnnnnnnnnnnnnnnnnnnnnnnnnnnnnnnnnnnnnnnnnnnnnnnnnnnnnnnnnnnnnnnnnnnnnnnnnnnnnnnnnnnnnnnnnnnnnnnnnnnnnnnnnnnnnnnnnnnnnnnnnnnnnnnnnnnnnnnnnnnnnnnnnnnnnnnnnnnnnnnnnnnnnnnnnnnnnnnnnnnnnnnnnnnnnnnnnnnnnnnnnnnnnnnnnnnnnnnnnnnnnnnnnnnnnnnnnnnnnnnnnnnnnnnnnnnnnnnnnnnnnnnnnnnnnnnnnnnnnnnnnnnnnnnnnnnnnnnnnnnnnnnnnnnnnnnnnnnnnnnnnnnnnnnnnnnnnnnnnnnnnnnnnnnnnnnnnnnnnnnnnnnnnnnnnnnnnnnnnnnnnnnnnnnnnnnnnnnnnnnnnnnnnnnnnnnnnnnnnnnnnnnnnnnnnnnnnnnnnnnnnnnnnnnnnnnnnnnnnnnnnnnnnnnnnnnnnnnnnnnnnnnnnnnnnnnnnnnnnnnnnnnnnnnnnnnnnnnnnnnnnnnnnnnnnnnnnnnnnnnnnnnnnnnnnnnnnnnnnnnnnnnnnnnnnnnnnnnnnnnnnnnnnnnnnnnnnnnnnnnnnnnnnnnnnnnnnnnnnnnnnnnnnnnnnnnnnnnnnnnnnnnnnnnnnnnnnnnnnnnnnnnnnnnnnnnnnnnnnnnnnnnnnnnnnnnnnnnnnnnnnnnnnnnnnnnnnnnnnnnnnnnnnnnnnnnnnnnnnnnnnnnnnnnnnnnnnnnnnnnnnnnnnnnnnnnnnnnnnnnnnnnnnnnnnnnnnnnnnnnnnnnnnnnnnnnnnnnnnnnnnnnnnnnnnnnnnnnnnnnnnnnnnnnnnnnnnnnnnnnnnnnnnnnnnnnnnnnnnnnnnnnnnnnnnnnnnnnnnnnnnnnnnnnnnnnnnnnnnnnnnnnnnnnnnnnnnnnnnnnnnnnnnnnnnnnnnnnnnnnnnnnnnnnnnnnnnnnnnnnnnnnnnnnnnnnnnnnnnnnnnnnnnnnnnnnnnnnnnnnnnnnnnnnnnnnnnnnnnnnnnnnnnnnnnnnnnnnnnnnnnnnnnnnnnnnnnnnnnnnnnnnnnnnnnnnnnnnnnnnnnnnnnnnnnnnnnnnnnnnnnnnnnnnnnnnnnnnnnnnnnnnnnnnnnnnnnnnnnnnnnnnnnnnnnnnnnnnnnnnnnnnnnnnnnnnnnnnnnnnnnnnnnnnnnnnnnnnnnnnnnnnnnnnnnnnnnnnnnnnnnnnnnnnnnnnnnnnnnnnnnnnnnnnnnnnnnnnnnnnnnnnnnnnnnnnnnnnnnnnnnnnnnnnnnnnnnnnnnnnnnnnnnnnnnnnnnnnnnnnnnnnnnnnnnnnnnnnnnnnnnnnnnnnnnnnnnnnnnnnnnnnnnnnnnnnnnnnnnnnnnnnnnnnnnnnnnnnnnnnnnnnnnnnnnnnnnnnnnnnnnnnnnnnnnnnnnnnnnnnnnnnnnnnnnnnnnnnnnnnnnnnnnnnnnnnnnnnnnnnnnnnnnnnnnnnnnnnnnnnnnnnnnnnnnnnnnnnnnnnnnnnnnnnnnnnnnnnnnnnnnnnnnnnnnnnnnnnnnnnnnnnnnnnnnnnnnnnnnnnnnnnnnnnnnnnnnnnnnnnnnnnnnnnnnnnnnnnnnnnnnnnnnnnnnnnnnnnnnnnnnnnnnnnnnnnnnnnnnnnnnnnnnnnnnnnnnnnnnnnnnnnnnnnnnnnnnnnnnnnnnnnnnnnnnnnnnnnnnnnnnnnnnnnnnnnnnnnnnnnnnnnnnnnnnnnnnnnnnnnnnnnnnnnnnnnnnnnnnnnnnnnnnnnnnnnnnnnnnnnnnnnnnnnnnnnnnnnnnnnnnnnnnnnnnnnnnnnnnnnnnnnnnnnnnnnnnnnnnnnnnnnnnnnnnnnnnnnnnnnnnnnnnnnnnnnnnnnnnnnnnnnnnnnnnnnnnnnnnnnnnnnnnnnnnnnnnnnnnnnnnnnnnnnnnnnnnnnnnnnnnnnnnnnnnnnnnnnnnnnnnnnnnnnnnnnnnnnnnnnnnnnnnnnnnnnnnnnnnnnnnnnnnnnnnnnnnnnnnnnnnnnnnnnnnnnnnnnnnnnnnnnnnnnnnnnnnnnnnnnnnnnnnnnnnnnnnnnnnnnnnnnnnnnnnnnnnnnnnnnnnnnnnnnnnnnnnnnnnnnnnnnnnnnnnnnnnnnnnnnnnnnnnnnnnnnnnnnnnnnnnnnnnnnnnnnnnnnnnnnnnnnnnnnnnnnnnnnnnnnnnnnnnnnnnnnnnnnnnnnnnnnnnnnnnnnnnnnnnnnnnnnnnnnnnnnnnnnnnnnnnnnnnnnnnnnnnnnnnnnnnnnnnnnnnnnnnnnnnnnnnnnnnnnnnnnnnnnnnnnnnnnnnnnnnnnnnnnnnnnnnnnnnnnnnnnnnnnnnnnnnnnnnnnnnnnnnnnnnnnnnnnnnnnnnnnnnnnnnnnnnnnnnnnnnnnnnnnnnnnnnnnnnnnnnnnnnnnnnnnnnnnnnnnnnnnnnnnnnnnnnnnnnnnnnnnnnnnnnnnnnnnnnnnnnnnnnnnnnnnnnnnnnnnnnnnnnnnnnnnnnnnnnnnnnnnnnnnnnnnnnnnnnnnnnnnnnnnnnnnnnnnnnnnnnnnnnnnnnnnnnnnnnnnnnnnnnnnnnnnnnnnnnnnnnnnnnnnnnnnnnnnnnnnnnnnnnnnnnnnnnnnnnnnnnnnnnnnnnnnnnnnnnnnnnnnnnnnnnnnnnnnnnnnnnnnnnnnnnnnnnnnnnnnnnnnnnnnnnnnnnnnnnnnnnnnnnnnnnnnnnnnnnnnnnnnnnnnnnnnnnnnnnnnnnnnnnnnnnnnnnnnnnnnnnnnnnnnnnnnnnnnnnnnnnnnnnnnnnnnnnnnnnnnnnnnnnnnnnnnnnnnnnnnnnnnnnnnnnnnnnnnnnnnnnnnnnnnnnnnnnnnnnnnnnnnnnnnnnnnnnnnnnnnnnnnnnnnnnnnnnnnnnnnnnnnnnnnnnnnnnnnnnnnnnnnnnnnnnnnnnnnnnnnnnnnnnnnnnnnnnnnnnnnnnnnnnnnnnnnnnnnnnnnnnnnnnnnnnnnnnnnnnnnnnnnnnnnnnnnnnnnnnnnnnnnnnnnnnnnnnnnnnnnnnnnnnnnnnnnnnnnnnnnnnnnnnnnnnnnnnnnnnnnnnnnnnnnnnnnnnnnnnnnnnnnnnnnnnnnnnnnnnnnnnnnnnnnnnnnnnnnnnnnnnnnnnnnnnnnnnnnnnnnnnnnnnnnnnnnnnnnnnnnnnnnnnnnnnnnnnnnnnnnnnnnnnnnnnnnnnnnnnnnnnnnnnnnnnnnnnnnnnnnnnnnnnnnnnnnnnnnnnnnnnnnnnnnnnnnnnnnnnnnnnnnnnnnnnnnnnnnnnnnnnnnnnnnnnnnnnnnnnnnnnnnnnnnnnnnnnnnnnnnnnnnnnnnnnnnnnnnnnnnnnnnnnnnnnnnnnnnnnnnnnnnnnnnnnnnnnnnnnnnnnnnnnnnnnnnnnnnnnnnnnnnnnnnnnnnnnnnnnnnnnnnnnnnnnnnnnnnnnnnnnnnnnnnnnnnnnnnnnnnnnnnnnnnnnnnnnnnnnnnnnnnnnnnnnnnnnnnnnnnnnnnnnnnnnnnnnnnnnnnnnnnnnnnnnnnnnnnnnnnnnnnnnnnnnnnnnnnnnnnnnnnnnnnnnnnnnnnnnnnnnnnnnnnnnnnnnnnnnnnnnnnnnnnnnnnnnnnnnnnnnnnnnnnnnnnnnnnnnnnnnnnnnnnnnnnnnnnnnnnnnnnnnnnnnnnnnnnnnnnnnnnnnnnnnnnnnnnnnnnnnnnnnnnnnnnnnnnnnnnnnnnnnnnnnnnnnnnnnnnnnnnnnnnnnnnnnnnnnnnnnnnnnnnnnnnnnnnnnnnnnnnnnnnnnnnnnnnnnnnnnnnnnnnnnnnnnnnnnnnnnnnnnnnnnnnnnnnnnnnnnnnnnnnnnnnnnnnnnnnnnnnnnnnnnnnnnnnnnnnnnnnnnnnnnnnnnnnnnnnnnnnnnnnnnnnnnnnnnnnnnnnnnnnnnnnnnnnnnnnnnnnnnnnnnnnnnnnnnnnnnnnnnnnnnnnnnnnnnnnnnnnnnnnnnnnnnnnnnnnnnnnnnnnnnnnnnnnnnnnnnnnnnnnnnnnnnnnnnnnnnnnnnnnnnnnnnnnnnnnnnnnnnnnnnnnnnnnnnnnnnnnnnnnnnnnnnnnnnnnnnnnnnnnnnnnnnnnnnnnnnnnnnnnnnnnnnnnnnnnnnnnnnnnnnnnnnnnnnnnnnnnnnnnnnnnnnnnnnnnnnnnnnnnnnnnnnnnnnnnnnnnnnnnnnnnnnnnnnnnnnnnnnnnnnnnnnnnnnnnnnnnnnnnnnnnnnnnnnnnnnnnnnnnnnnnnnnnnnnnnnnnnnnnnnnnnnnnnnnnnnnnnnnnnnnnnnnnnnnnnnnnnnnnnnnnnnnnnnnnnnnnnnnnnnnnnnnnnnnnnnnnnnnnnnnnnnnnnnnnnnnnnnnnnnnnnnnnnnnnnnnnnnnnnnnnnnnnnnnnnnnnnnnnnnnnnnnnnnnnnnnnnnnnnnnnnnnnnnnnnnnnnnnnnnnnnnnnnnnnnnnnnnnnnnnnnnnnnnnnnnnnnnnnnnnnnnnnnnnnnnnnnnnnnnnnnnnnnnnnnnnnnnnnnnnnnnnnnnnnnnnnnnnnnnnnnnnnnnnnnnnnnnnnnnnnnnnnnnnnnnnnnnnnnnnnnnnnnnnnnnnnnnnnnnnnnnnnnnnnnnnnnnnnnnnnnnnnnnnnnnnnnnnnnnnnnnnnnnnnnnnnnnnnnnnnnnnnnnnnnnnnnnnnnnnnnnnnnnnnnnnnnnnnnnnnnnnnnnnnnnnnnnnnnnnnnnnnnnnnnnnnnnnnnnnnnnnnnnnnnnnnnnnnnnnnnnnnnnnnnnnnnnnnnnnnnnnnnnnnnnnnnnnnnnnnnnnnnnnnnnnnnnnnnnnnnnnnnnnnnnnnnnnnnnnnnnnnnnnnnnnnnnnnnnnnnnnnnnnnnnnnnnnnnnnnnnnnnnnnnnnnnnnnnnnnnnnnnnnnnnnnnnnnnnnnnnnnnnnnnnnnnnnnnnnnnnnnnnnnnnnnnnnnnnnnnnnnnnnnnnnnnnnnnnnnnnnnnnnnnnnnnnnnnnnnnnnnnnnnnnnnnnnnnnnnnnnnnnnnnnnnnnnnnnnnnnnnnnnnnnnnnnnnnnnnnnnnnnnnnnnnnnnnnnnnnnnnnnnnnnnnnnnnnnnnnnnnnnnnnnnnnnnnnnnnnnnnnnnnnnnnnnnnnnnnnnnnnnnnnnnnnnnnnnnnnnnnnnnnnnnnnnnnnnnnnnnnnnnnnnnnnnnnnnnnnnnnnnnnnnnnnnnnnnnnnnnnnnnnnnnnnnnnnnnnnnnnnnnnnnnnnnnnnnnnnnnnnnnnnnnnnnnnnnnnnnnnnnnnnnnnnnnnnnnnnnnnnnnnnnnnnnnnnnnnnnnnnnnnnnnnnnnnnnnnnnnnnnnnnnnnnnnnnnnnnnnnnnnnnnnnnnnnnnnnnnnnnnnnnnnnnnnnnnnnnnnnnnnnnnnnnnnnnnnnnnnnnnnnnnnnnnnnnnnnnnnnnnnnnnnnnnnnnnnnnnnnnnnnnnnnnnnnnnnnnnnnnnnnnnnnnnnnnnnnnnnnnnnnnnnnnnnnnnnnnnnnnnnnnnnnnnnnnnnnnnnnnnnnnnnnnnnnnnnnnnnnnnnnnnnnnnnnnnnnnnnnnnnnnnnnnnnnnnnnnnnnnnnnnnnnnnnnnnnnnnnnnnnnnnnnnnnnnnnnnnnnnnnnnnnnnnnnnnnnnnnnnnnnnnnnnnnnnnnnnnnnnnnnnnnnnnnnnnnnnnnnnnnnnnnnnnnnnnnnnnnnnnnnnnnnnnnnnnnnnnnnnnnnnnnnnnnnnnnnnnnnnnnnnnnnnnnnnnnnnnnnnnnnnnnnnnnnnnnnnnnnnnnnnnnnnnnnnnnnnnnnnnnnnnnnnnnnnnnnnnnnnnnnnnnnnnnnnnnnnnnnnnnnnnnnnnnnnnnnnnnnnnnnnnnnnnnnnnnnnnnnnnnnnnnnnnnnnnnnnnnnnnnnnnnnnnnnnnnnnnnnnnnnnnnnnnnnnnnnnnnnnnnnnnnnnnnnnnnnnnnnnnnnnnnnnnnnnnnnnnnnnnnnnnnnnnnnnnnnnnnnnnnnnnnnnnnnnnnnnnnnnnnnnnnnnnnnnnnnnnnnnnnnnnnnnnnnnnnnnnnnnnnnnnnnnnnnnnnnnnnnnnnnnnnnnnnnnnnnnnnnnnnnnnnnnnnnnnnnnnnnnnnnnnnnnnnnnnnnnnnnnnnnnnnnnnnnnnnnnnnnnnnnnnnnnnnnnnnnnnnnnnnnnnnnnnnnnnnnnnnnnnnnnnnnnnnnnnnnnnnnnnnnnnnnnnnnnnnnnnnnnnnnnnnnnnnnnnnnnnnnnnnnnnnnnnnnnnnnnnnnnnnnnnnnnnnnnnnnnnnnnnnnnnnnnnnnnnnnnnnnnnnnnnnnnnnnnnnnnnnnnnnnnnnnnnnnnnnnnnnnnnnnnnnnnnnnnnnnnnnnnnnnnnnnnnnnnnnnnnnnnnnnnnnnnnnnnnnnnnnnnnnnnnnnnnnnnnnnnnnnnnnnnnnnnnnnnnnnnnnnnnnnnnnnnnnnnnnnnnnnnnnnnnnnnnnnnnnnnnnnnnnnnnnnnnnnnnnnnnnnnnnnnnnnnnnnnnnnnnnnnnnnnnnnnnnnnnnnnnnnnnnnnnnnnnnnnnnnnnnnnnnnnnnnnnnnnnnnnnnnnnnnnnnnnnnnnnnnnnnnnnnnnnnnnnnnnnnnnnnnnnnnnnnnnnnnnnnnnnnnnnnnnnnnnnnnnnnnnnnnnnnnnnnnnnnnnnnnnnnnnnnnnnnnnnnnnnnnnnnnnnnnnnnnnnnnnnnnnnnnnnnnnnnnnnnnnnnnnnnnnnnnnnnnnnnnnnnnnnnnnnnnnnnnnnnnnnnnnnnnnnnnnnnnnnnnnnnnnnnnnnnnnnnnnnnnnnnnnnnnnnnnnnnnnnnnnnnnnnnnnnnnnnnnnnnnnnnnnnnnnnnnnnnnnnnnnnnnnnnnnnnnnnnnnnnnnnnnnnnnnnnnnnnnnnnnnnnnnnnnnnnnnnnnnnnnnnnnnnnnnnnnnnnnnnnnnnnnnnnnnnnnnnnnnnnnnnnnnnnnnnnnnnnnnnnnnnnnnnnnnnnnnnnnnnnnnnnnnnnnnnnnnnnnnnnnnnnnnnnnnnnnnnnnnnnnnnnnnnnnnnnnnnnnnnnnnnnnnnnnnnnnnnnnnnnnnnnnnnnnnnnnnnnnnnnnnnnnnnnnnnnnnnnnnnnnnnnnnnnnnnnnnnnnnnnnnnnnnnnnnnnnnnnnnnnnnnnnnnnnnnnnnnnnnnnnnnnnnnnnnnnnnnnnnnnnnnnnnnnnnnnnnnnnnnnnnnnnnnnnnnnnnnnnnnnnnnnnnnnnnnnnnnnnnnnnnnnnnnnnnnnnnnnnnnnnnnnnnnnnnnnnnnnnnnnnnnnnnnnnnnnnnnnnnnnnnnnnnnnnnnnnnnnnnnnnnnnnnnnnnnnnnnnnnnnnnnnnnnnnnnnnnnnnnnnnnnnnnnnnnnnnnnnnnnnnnnnnnnnnnnnnnnnnnnnnnnnnnnnnnnnnnnnnnnnnnnnnnnnnnnnnnnnnnnnnnnnnnnnnnnnnnnnnnnnnnnnnnnnnnnnnnnnnnnnnnnnnnnnnnnnnnnnnnnnnnnnnnnnnnnnnnnnnnnnnnnnnnnnnnnnnnnnnnnnnnnnnnnnnnnnnnnnnnnnnnnnnnnnnnnnnnnnnnnnnnnnnnnnnnnnnnnnnnnnnnnnnnnnnnnnnnnnnnnnnnnnnnnnnnnnnnnnnnnnnnnnnnnnnnnnnnnnnnnnnnnnnnnnnnnnnnnnnnnnnnnnnnnnnnnnnnnnnnnnnnnnnnnnnnnnnnnnnnnnnnnnnnnnnnnnnnnnnnnnnnnnnnnnnnnnnnnnnnnnnnnnnnnnnnnnnnnnnnnnnnnnnnnnnnnnnnnnnnnnnnnnnnnnnnnnnnnnnnnnnnnnnnnnnnnnnnnnnnnnnnnnnnnnnnnnnnnnnnnnnnnnnnnnnnnnnnnnnnnnnnnnnnnnnnnnnnnnnnnnnnnnnnnnnnnnnnnnnnnnnnnnnnnnnnnnnnnnnnnnnnnnnnnnnnnnnnnnnnnnnnnnnnnnnnnnnnnnnnnnnnnnnnnnnnnnnnnnnnnnnnnnnnnnnnnnnnnnnnnnnnnnnnnnnnnnnnnnnnnnnnnnnnnnnnnnnnnnnnnnnnnnnnnnnnnnnnnnnnnnnnnnnnnnnnnnnnnnnnnnnnnnnnnnnnnnnnnnnnnnnnnnnnnnnnnnnnnnnnnnnnnnnnnnnnnnnnnnnnnnnnnnnnnnnnnnnnnnnnnnnnnnnnnnnnnnnnnnnnnnnnnnnnnnnnnnnnnnnnnnnnnnnnnnnnnnnnnnnnnnnnnnnnnnnnnnnnnnnnnnnnnnnnnnnnnnnnnnnnnnnnnnnnnnnnnnnnnnnnnnnnnnnnnnnnnnnnnnnnnnnnnnnnnnnnnnnnnnnnnnnnnnnnnnnnnnnnnnnnnnnnnnnnnnnnnnnnnnnnnnnnnnnnnnnnnnnnnnnnnnnnnnnnnnnnnnnnnnnnnnnnnnnnnnnnnnnnnnnnnnnnnnnnnnnnnnnnnnnnnnnnnnnnnnnnnnnnnnnnnnnnnnnnnnnnnnnnnnnnnnnnnnnnnnnnnnnnnnnnnnnnnnnnnnnnnnnnnnnnnnnnnnnnnnnnnnnnnnnnnnnnnnnnnnnnnnnnnnnnnnnnnnnnnnnnnnnnnnnnnnnnnnnnnnnnnnnnnnnnnnnnnnnnnnnnnnnnnnnnnnnnnnnnnnnnnnnnnnnnnnnnnnnnnnnnnnnnnnnnnnnnnnnnnnnnnnnnnnnnnnnnnnnnnnnnnnnnnnnnnnnnnnnnnnnnnnnnnnnnnnnnnnnnnnnnnnnnnnnnnnnnnnnnnnnnnnnnnnnnnnnnnnnnnnnnnnnnnnnnnnnnnnnnnnnnnnnnnnnnnnnnnnnnnnnnnnnnnnnnnnnnnnnnnnnnnnnnnnnnnnnnnnnnnnnnnnnnnnnnnnnnnnnnnnnnnnnnnnnnnnnnnnnnnnnnnnnnnnnnnnnnnnnnnnnnnnnnnnnnnnnnnnnnnnnnnnnnnnnnnnnnnnnnnnnnnnnnnnnnnnnnnnnnnnnnnnnnnnnnnnnnnnnnnnnnnnnnnnnnnnnnnnnnnnnnnnnnnnnnnnnnnnnnnnnnnnnnnnnnnnnnnnnnnnnnnnnnnnnnnnnnnnnnnnnnnnnnnnnnnnnnnnnnnnnnnnnnnnnnnnnnnnnnnnnnnnnnnnnnnnnnnnnnnnnnnnnnnnnnnnnnnnnnnnnnnnnnnnnnnnnnnnnnnnnnnnnnnnnnnnnnnnnnnnnnnnnnnnnnnnnnnnnnnnnnnnnnnnnnnnnnnnnnnnnnnnnnnnnnnnnnnnnnnnnnnnnnnnnnnnnnnnnnnnnnnnnnnnnnnnnnnnnnnnnnnnnnnnnnnnnnnnnnnnnnnnnnnnnnnnnnnnnnnnnnnnnnnnnnnnnnnnnnnnnnnnnnnnnnnnnnnnnnnnnnnnnnnnnnnnnnnnnnnnnnnnnnnnnnnnnnnnnnnnnnnnnnnnnnnnnnnnnnnnnnnnnnnnnnnnnnnnnnnnnnnnnnnnnnnnnnnnnnnnnnnnnnnnnnnnnnnnnnnnnnnnnnnnnnnnnnnnnnnnnnnnnnnnnnnnnnnnnnnnnnnnnnnnnnnnnnnnnnnnnnnnnnnnnnnnnnnnnnnnnnnnnnnnnnnnnnnnnnnnnnnnnnnnnnnnnnnnnnnnnnnnnnnnnnnnnnnnnnnnnnnnnnnnnnnnnnnnnnnnnnnnnnnnnnnnnnnnnnnnnnnnnnnnnnnnnnnnnnnnnnnnnnnnnnnnnnnnnnnnnnnnnnnnnnnnnnnnnnnnnnnnnnnnnnnnnnnnnnnnnnnnnnnnnnnnnnnnnnnnnnnnnnnnnnnnnnnnnnnnnnnnnnnnnnnnnnnnnnnnnnnnnnnnnnnnnnnnnnnnnnnnnnnnnnnnnnnnnnnnnnnnnnnnnnnnnnnnnnnnnnnnnnnnnnnnnnnnnnnnnnnnnnnnnnnnnnnnnnnnnnnnnnnnnnnnnnnnnnnnnnnnnnnnnnnnnnnnnnnnnnnnnnnnnnnnnnnnnnnnnnnnnnnnnnnnnnnnnnnnnnnnnnnnnnnnnnnnnnnnnnnnnnnnnnnnnnnnnnnnnnnnnnnnnnnnnnnnnnnnnnnnnnnnnnnnnnnnnnnnnnnnnnnnnnnnnnnnnnnnnnnnnnnnnnnnnnnnnnnnnnnnnnnnnnnnnnnnnnnnnnnnnnnnnnnnnnnnnnnnnnnnnnnnnnnnnnnnnnnnnnnnnnnnnnnnnnnnnnnnnnnnnnnnnnnnnnnnnnnnnnnnnnnnnnnnnnnnnnnnnnnnnnnnnnnnnnnnnnnnnnnnnnnnnnnnnnnnnnnnnnnnnnnnnnnnnnnnnnnnnnnnnnnnnnnnnnnnnnnnnnnnnnnnnnnnnnnnnnnnnnnnnnnnnnnnnnnnnnnnnnnnnnnnnnnnnnnnnnnnnnnnnnnnnnnnnnnnnnnnnnnnnnnnnnnnnnnnnnnnnnnnnnnnnnnnnnnnnnnnnnnnnnnnnnnnnnnnnnnnnnnnnnnnnnnnnnnnnnnnnnnnnnnnnnnnnnnnnnnnnnnnnnnnnnnnnnnnnnnnnnnnnnnnnnnnnnnnnnnnnnnnnnnnnnnnnnnnnnnnnnnnnnnnnnnnnnnnnnnnnnnnnnnnnnnnnnnnnnnnnnnnnnnnnnnnnnnnnnnnnnnnnnnnnnnnnnnnnnnnnnnnnnnnnnnnnnnnnnnnnnnnnnnnnnnnnnnnnnnnnnnnnnnnnnnnnnnnnnnnnnnnnnnnnnnnnnnnnnnnnnnnnnnnnnnnnnnnnnnnnnnnnnnnnnnnnnnnnnnnnnnnnnnnnnnnnnnnnnnnnnnnnnnnnnnnnnnnnnnnnnnnnnnnnnnnnnnnnnnnnnnnnnnnnnnnnnnnnnnnnnnnnnnnnnnnnnnnnnnnnnnnnnnnnnnnnnnnnnnnnnnnnnnnnnnnnnnnnnnnnnnnnnnnnnnnnnnnnnnnnnnnnnnnnnnnnnnnnnnnnnnnnnnnnnnnnnnnnnnnnnnnnnnnnnnnnnnnnnnnnnnnnnnnnnnnnnnnnnnnnnnnnnnnnnnnnnnnnnnnnnnnnnnnnnnnnnnnnnnnnnnnnnnnnnnnnnnnnnnnnnnnnnnnnnnnnnnnnnnnnnnnnnnnnnnnnnnnnnnnnnnnnnnnnnnnnnnnnnnnnnnnnnnnnnnnnnnnnnnnnnnnnnnnnnnnnnnnnnnnnnnnnnnnnnnnnnnnnnnnnnnnnnnnnnnnnnnnnnnnnnnnnnnnnnnnnnnnnnnnnnnnnnnnnnnnnnnnnnnnnnnnnnnnnnnnnnnnnnnnnnnnnnnnnnnnnnnnnnnnnnnnnnnnnnnnnnnnnnnnnnnnnnnnnnnnnnnnnnnnnnnnnnnnnnnnnnnnnnnnnnnnnnnnnnnnnnnnnnnnnnnnnnnnnnnnnnnnnnnnnnnnnnnnnnnnnnnnnnnnnnnnnnnnnnnnnnnnnnnnnnnnnnnnnnnnnnnnnnnnnnnnnnnnnnnnnnnnnnnnnnnnnnnnnnnnnnnnnnnnnnnnnnnnnnnnnnnnnnnnnnnnnnnnnnnnnnnnnnnnnnnnnnnnnnnnnnnnnnnnnnnnnnnnnnnnnnnnnnnnnnnnnnnnnnnnnnnnnnnnnnnnnnnnnnnnnnnnnnnnnnnnnnnnnnnnnnnnnnnnnnnnnnnnnnnnnnnnnnnnnnnnnnnnnnnnnnnnnnnnnnnnnnnnnnnnnnnnnnnnnnnnnnnnnnnnnnnnnnnnnnnnnnnnnnnnnnnnnnnnnnnnnnnnnnnnnnnnnnnnnnnnnnnnnnnnnnnnnnnnnnnnnnnnnnnnnnnnnnnnnnnnnnnnnnnnnnnnnnnnnnnnnnnnnnnnnnnnnnnnnnnnnnnnnnnnnnnnnnnnnnnnnnnnnnnnnnnnnnnnnnnnnnnnnnnnnnnnnnnnnnnnnnnnnnnnnnnnnnnnnnnnnnnnnnnnnnnnnnnnnnnnnnnnnnnnnnnnnnnnnnnnnnnnnnnnnnnnnnnnnnnnnnnnnnnnnnnnnnnnnnnnnnnnnnnnnnnnnnnnnnnnnnnnnnnnnnnnnnnnnnnnnnnnnnnnnnnnnnnnnnnnnnnnnnnnnnnnnnnnnnnnnnnnnnnnnnnnnnnnnnnnnnnnnnnnnnnnnnnnnnnnnnnnnnnnnnnnnnnnnnnnnnnnnnnnnnnnnnnnnnnnnnnnnnnnnnnnnnnnnnnnnnnnnnnnnnnnnnnnnnnnnnnnnnnnnnnnnnnnnnnnnnnnnnnnnnnnnnnnnnnnnnnnnnnnnnnnnnnnnnnnnnnnnnnnnnnnnnnnnnnnnnnnnnnnnnnnnnnnnnnnnnnnnnnnnnnnnnnnnnnnnnnnnnnnnnnnnnnnnnnnnnnnnnnnnnnnnnnnnnnnnnnnnnnnnnnnnnnnnnnnnnnnnnnnnnnnnnnnnnnnnnnnnnnnnnnnnnnnnnnnnnnnnnnnnnnnnnnnnnnnnnnnnnnnnnnnnnnnnnnnnnnnnnnnnnnnnnnnnnnnnnnnnnnnnnnnnnnnnnnnnnnnnnnnnnnnnnnnnnnnnnnnnnnnnnnnnnnnnnnnnnnnnnnnnnnnnnnnnnnnnnnnnnnnnnnnnnnnnnnnnnnnnnnnnnnnnnnnnnnnnnnnnnnnnnnnnnnnnnnnnnnnnnnnnnnnnnnnnnnnnnnnnnnnnnnnnnnnnnnnnnnnnnnnnnnnnnnnnnnnnnnnnnnnnnnnnnnnnnnnnnnnnnnnnnnnnnnnnnnnnnnnnnnnnnnnnnnnnnnnnnnnnnnnnnnnnnnnnnnnnnnnnnnnnnnnnnnnnnnnnnnnnnnnnnnnnnnnnnnnnnnnnnnnnnnnnnnnnnnnnnnnnnnnnnnnnnnnnnnnnnnnnnnnnnnnnnnnnnnnnnnnnnnnnnnnnnnnnnnnnnnnnnnnnnnnnnnnnnnnnnnnnnnnnnnnnnnnnnnnnnnnnnnnnnnnnnnnnnnnnnnnnnnnnnnnnnnnnnnnnnnnnnnnnnnnnnnnnnnnnnnnnnnnnnnnnnnnnnnnnnnnnnnnnnnnnnnnnnnnnnnnnnnnnnnnnnnnnnnnnnnnnnnnnnnnnnnnnnnnnnnnnnnnnnnnnnnnnnnnnnnnnnnnnnnnnnnnnnnnnnnnnnnnnnnnnnnnnnnnnnnnnnnnnnnnnnnnnnnnnnnnnnnnnnnnnnnnnnnnnnnnnnnnnnnnnnnnnnnnnnnnnnnnnnnnnnnnnnnnnnnnnnnnnnnnnnnnnnnnnnnnnnnnnnnnnnnnnnnnnnnnnnnnnnnnnnnnnnnnnnnnnnnnnnnnnnnnnnnnnnnnnnnnnnnnnnnnnnnnnnnnnnnnnnnnnnnnnnnnnnnnnnnnnnnnnnnnnnnnnnnnnnnnnnnnnnnnnnnnnnnnnnnnnnnnnnnnnnnnnnnnnnnnnnnnnnnnnnnnnnnnnnnnnnnnnnnnnnnnnnnnnnnnnnnnnnnnnnnnnnnnnnnnnnnnnnnnnnnnnnnnnnnnnnnnnnnnnnnnnnnnnnnnnnnnnnnnnnnnnnnnnnnnnnnnnnnnnnnnnnnnnnnnnnnnnnnnnnnnnnnnnnnnnnnnnnnnnnnnnnnnnnnnnnnnnnnnnnnnnnnnnnnnnnnnnnnnnnnnnnnnnnnnnnnnnnnnnnnnnnnnnnnnnnnnnnnnnnnnnnnnnnnnnnnnnnnnnnnnnnnnnnnnnnnnnnnnnnnnnnnnnnnnnnnnnnnnnnnnnnnnnnnnnnnnnnnnnnnnnnnnnnnnnnnnnnnnnnnnnnnnnnnnnnnnnnnnnnnnnnnnnnnnnnnnnnnnnnnnnnnnnnnnnnnnnnnnnnnnnnnnnnnnnnnnnnnnnnnnnnnnnnnnnnnnnnnnnnnnnnnnnnnnnnnnnnnnnnnnnnnnnnnnnnnnnnnnnnnnnnnnnnnnnnnnnnnnnnnnnnnnnnnnnnnnnnnnnnnnnnnnnnnnnnnnnnnnnnnnnnnnnnnnnnnnnnnnnnnnnnnnnnnnnnnnnnnnnnnnnnnnnnnnnnnnnnnnnnnnnnnnnnnnnnnnnnnnnnnnnnnnnnnnnnnnnnnnnnnnnnnnnnnnnnnnnnnnnnnnnnnnnnnnnnnnnnnnnnnnnnnnnnnnnnnnnnnnnnnnnnnnnnnnnnnnnnnnnnnnnnnnnnnnnnnnnnnnnnnnnnnnnnnnnnnnnnnnnnnnnnnnnnnnnnnnnnnnnnnnnnnnnnnnnnnnnnnnnnnnnnnnnnnnnnnnnnnnnnnnnnnnnnnnnnnnnnnnnnnnnnnnnnnnnnnnnnnnnnnnnnnnnnnnnnnnnnnnnnnnnnnnnnnnnnnnnnnnnnnnnnnnnnnnnnnnnnnnnnnnnnnnnnnnnnnnnnnnnnnnnnnnnnnnnnnnnnnnnnnnnnnnnnnnnnnnnnnnnnnnnnnnnnnnnnnnnnnnnnnnnnnnnnnnnnnnnnnnnnnnnnnnnnnnnnnnnnnnnnnnnnnnnnnnnnnnnnnnnnnnnnnnnnnnnnnnnnnnnnnnnnnnnnnnnnnnnnnnnnnnnnnnnnnnnnnnnnnnnnnnnnnnnnnnnnnnnnnnnnnnnnnnnnnnnnnnnnnnnnnnnnnnnnnnnnnnnnnnnnnnnnnnnnnnnnnnnnnnnnnnnnnnnnnnnnnnnnnnnnnnnnnnnnnnnnnnnnnnnnnnnnnnnnnnnnnnnnnnnnnnnnnnnnnnnnnnnnnnnnnnnnnnnnnnnnnnnnnnnnnnnnnnnnnnnnnnnnnnnnnnnnnnnnnnnnnnnnnnnnnnnnnnnnnnnnnnnnnnnnnnnnnnnnnnnnnnnnnnnnnnnnnnnnnnnnnnnnnnnnnnnnnnnnnnnnnnnnnnnnnnnnnnnnnnnnnnnnnnnnnnnnnnnnnnnnnnnnnnnnnnnnnnnnnnnnnnnnnnnnnnnnnnnnnnnnnnnnnnnnnnnnnnnnnnnnnnnnnnnnnnnnnnnnnnnnnnnnnnnnnnnnnnnnnnnnnnnnnnnnnnnnnnnnnnnnnnnnnnnnnnnnnnnnnnnnnnnnnnnnnnnnnnnnnnnnnnnnnnnnnnnnnnnnnnnnnnnnnnnnnnnnnnnnnnnnnnnnnnnnnnnnnnnnnnnnnnnnnnnnnnnnnnnnnnnnnnnnnnnnnnnnnnnnnnnnnnnnnnnnnnnnnnnnnnnnnnnnnnnnnnnnnnnnnnnnnnnnnnnnnnnnnnnnnnnnnnnnnnnnnnnnnnnnnnnnnnnnnnnnnnnnnnnnnnnnnnnnnnnnnnnnnnnnnnnnnnnnnnnnnnnnnnnnnnnnnnnnnnnnnnnnnnnnnnnnnnnnnnnnnnnnnnnnnnnnnnnnnnnnnnnnnnnnnnnnnnnnnnnnnnnnnnnnnnnnnnnnnnnnnnnnnnnnnnnnnnnnnnnnnnnnnnnnnnnnnnnnnnnnnnnnnnnnnnnnnnnnnnnnnnnnnnnnnnnnnnnnnnnnnnnnnnnnnnnnnnnnnnnnnnnnnnnnnnnnnnnnnnnnnnnnnnnnnnnnnnnnnnnnnnnnnnnnnnnnnnnnnnnnnnnnnnnnnnnnnnnnnnnnnnnnnnnnnnnnnnnnnnnnnnnnnnnnnnnnnnnnnnnnnnnnnnnnnnnnnnnnnnnnnnnnnnnnnnnnnnnnnnnnnnnnnnnnnnnnnnnnnnnnnnnnnnnnnnnnnnnnnnnnnnnnnnnnnnnnnnnnnnnnnnnnnnnnnnnnnnnnnnnnnnnnnnnnnnnnnnnnnnnnnnnnnnnnnnnnnnnnnnnnnnnnnnnnnnnnnnnnnnnnnnnnnnnnnnnnnnnnnnnnnnnnnnnnnnnnnnnnnnnnnnnnnnnnnnnnnnnnnnnnnnnnnnnnnnnnnnnnnnnnnnnnnnnnnnnnnnnnnnnnnnnnnnnnnnnnnnnnnnnnnnnnnnnnnnnnnnnnnnnnnnnnnnnnnnnnnnnnnnnnnnnnnnnnnnnnnnnnnnnnnnnnnnnnnnnnnnnnnnnnnnnnnnnnnnnnnnnnnnnnnnnnnnnnnnnnnnnnnnnnnnnnnnnnnnnnnnnnnnnnnnnnnnnnnnnnnnnnnnnnnnnnnnnnnnnnnnnnnnnnnnnnnnnnnnnnnnnnnnnnnnnnnnnnnnnnnnnnnnnnnnnnnnnnnnnnnnnnnnnnnnnnnnnnnnnnnnnnnnnnnnnnnnnnnnnnnnnnnnnnnnnnnnnnnnnnnnnnnnnnnnnnnnnnnnnnnnnnnnnnnnnnnnnnnnnnnnnnnnnnnnnnnnnnnnnnnnnnnnnnnnnnnnnnnnnnnnnnnnnnnnnnnnnnnnnnnnnnnnnnnnnnnnnnnnnnnnnnnnnnnnnnnnnnnnnnnnnnnnnnnnnnnnnnnnnnnnnnnnnnnnnnnnnnnnnnnnnnnnnnnnnnnnnnnnnnnnnnnnnnnnnnnnnnnnnnnnnnnnnnnnnnnnnnnnnnnnnnnnnnnnnnnnnnnnnnnnnnnnnnnnnnnnnnnnnnnnnnnnnnnnnnnnnnnnnnnnnnnnnnnnnnnnnnnnnnnnnnnnnnnnnnnnnnnnnnnnnnnnnnnnnnnnnnnnnnnnnnnnnnnnnnnnnnnnnnnnnnnnnnnnnnnnnnnnnnnnnnnnnnnnnnnnnnnnnnnnnnnnnnnnnnnnnnnnnnnnnnnnnnnnnnnnnnnnnnnnnnnnnnnnnnnnnnnnnnnnnnnnnnnnnnnnnnnnnnnnnnnnnnnnnnnnnnnnnnnnnnnnnnnnnnnnnnnnnnnnnnnnnnnnnnnnnnnnnnnnnnnnnnnnnnnnnnnnnnnnnnnnnnnnnnnnnnnnnnnnnnnnnnnnnnnnnnnnnnnnnnnnnnnnnnnnnnnnnnnnnnnnnnnnnnnnnnnnnnnnnnnnnnnnnnnnnnnnnnnnnnnnnnnnnnnnnnnnnnnnnnnnnnnnnnnnnnnnnnnnnnnnnnnnnnnnnnnnnnnnnnnnnnnnnnnnnnnnnnnnnnnnnnnnnnnnnnnnnnnnnnnnnnnnnnnnnnnnnnnnnnnnnnnnnnnnnnnnnnnnnnnnnnnnnnnnnnnnnnnnnnnnnnnnnnnnnnnnnnnnnnnnnnnnnnnnnnnnnnnnnnnnnnnnnnnnnnnnnnnnnnnnnnnnnnnnnnnnnnnnnnnnnnnnnnnnnnnnnnnnnnnnnnnnnnnnnnnnnnnnnnnnnnnnnnnnnnnnnnnnnnnnnnnnnnnnnnnnnnnnnnnnnnnnnnnnnnnnnnnnnnnnnnnnnnnnnnnnnnnnnnnnnnnnnnnnnnnnnnnnnnnnnnnnnnnnnnnnnnnnnnnnnnnnnnnnnnnnnnnnnnnnnnnnnnnnnnnnnnnnnnnnnnnnnnnnnnnnnnnnnnnnnnnnnnnnnnnnnnnnnnnnnnnnnnnnnnnnnnnnnnnnnnnnnnnnnnnnnnnnnnnnnnnnnnnnnnnnnnnnnnnnnnnnnnnnnnnnnnnnnnnnnnnnnnnnnnnnnnnnnnnnnnnnnnnnnnnnnnnnnnnnnnnnnnnnnnnnnnnnnnnnnnnnnnnnnnnnnnnnnnnnnnnnnnnnnnnnnnnnnnnnnnnnnnnnnnnnnnnnnnnnnnnnnnnnnnnnnnnnnnnnnnnnnnnnnnnnnnnnnnnnnnnnnnnnnnnnnnnnnnnnnnnnnnnnnnnnnnnnnnnnnnnnnnnnnnnnnnnnnnnnnnnnnnnnnnnnnnnnnnnnnnnnnnnnnnnnnnnnnnnnnnnnnnnnnnnnnnnnnnnnnnnnnnnnnnnnnnnnnnnnnnnnnnnnnnnnnnnnnnnnnnnnnnnnnnnnnnnnnnnnnnnnnnnnnnnnnnnnnnnnnnnnnnnnnnnnnnnnnnnnnnnnnnnnnnnnnnnnnnnnnnnnnnnnnnnnnnnnnnnnnnnnnnnnnnnnnnnnnnnnnnnnnnnnnnnnnnnnnnnnnnnnnnnnnnnnnnnnnnnnnnnnnnnnnnnnnnnnnnnnnnnnnnnnnnnnnnnnnnnnnnnnnnnnnnnnnnnnnnnnnnnnnnnnnnnnnnnnnnnnnnnnnnnnnnnnnnnnnnnnnnnnnnnnnnnnnnnnnnnnnnnnnnnnnnnnnnnnnnnnnnnnnnnnnnnnnnnnnnnnnnnnnnnnnnnnnnnnnnnnnnnnnnnnnnnnnnnnnnnnnnnnnnnnnnnnnnnnnnnnnnnnnnnnnnnnnnnnnnnnnnnnnnnnnnnnnnnnnnnnnnnnnnnnnnnnnnnnnnnnnnnnnnnnnnnnnnnnnnnnnnnnnnnnnnnnnnnnnnnnnnnnnnnnnnnnnnnnnnnnnnnnnnnnnnnnnnnnnnnnnnnnnnnnnnnnnnnnnnnnnnnnnnnnnnnnnnnnnnnnnnnnnnnnnnnnnnnnnnnnnnnnnnnnnnnnnnnnnnnnnnnnnnnnnnnnnnnnnnnnnnnnnnnnnnnnnnnnnnnnnnnnnnnnnnnnnnnnnnnnnnnnnnnnnnnnnnnnnnnnnnnnnnnnnnnnnnnnnnnnnnnnnnnnnnnnnnnnnnnnnnnnnnnnnnnnnnnnnnnnnnnnnnnnnnnnnnnnnnnnnnnnnnnnnnnnnnnnnnnnnnnnnnnnnnnnnnnnnnnnnnnnnnnnnnnnnnnnnnnnnnnnnnnnnnnnnnnnnnnnnnnnnnnnnnnnnnnnnnnnnnnnnnnnnnnnnnnnnnnnnnnnnnnnnnnnnnnnnnnnnnnnnnnnnnnnnnnnnnnnnnnnnnnnnnnnnnnnnnnnnnnnnnnnnnnnnnnnnnnnnnnnnnnnnnnnnnnnnnnnnnnnnnnnnnnnnnnnnnnnnnnnnnnnnnnnnnnnnnnnnnnnnnnnnnnnnnnnnnnnnnnnnnnnnnnnnnnnnnnnnnnnnnnnnnnnnnnnnnnnnnnnnnnnnnnnnnnnnnnnnnnnnnnnnnnnnnnnnnnnnnnnnnnnnnnnnnnnnnnnnnnnnnnnnnnnnnnnnnnnnnnnnnnnnnnnnnnnnnnnnnnnnnnnnnnnnnnnnnnnnnnnnnnnnnnnnnnnnnnnnnnnnnnnnnnnnnnnnnnnnnnnnnnnnnnnnnnnnnnnnnnnnnnnnnnnnnnnnnnnnnnnnnnnnnnnnnnnnnnnnnnnnnnnnnnnnnnnnnnnnnnnnnnnnnnnnnnnnnnnnnnnnnnnnnnnnnnnnnnnnnnnnnnnnnnnnnnnnnnnnnnnnnnnnnnnnnnnnnnnnnnnnnnnnnnnnnnnnnnnnnnnnnnnnnnnnnnnnnnnnnnnnnnnnnnnnnnnnnnnnnnnnnnnnnnnnnnnnnnnnnnnnnnnnnnnnnnnnnnnnnnnnnnnnnnnnnnnnnnnnnnnnnnnnnnnnnnnnnnnnnnnnnnnnnnnnnnnnnnnnnnnnnnnnnnnnnnnnnnnnnnnnnnnnnnnnnnnnnnnnnnnnnnnnnnnnnnnnnnnnnnnnnnnnnnnnnnnnnnnnnnnnnnnnnnnnnnnnnnnnnnnnnnnnnnnnnnnnnnnnnnnnnnnnnnnnnnnnnnnnnnnnnnnnnnnnnnnnnnnnnnnnnnnnnnnnnnnnnnnnnnnnnnnnnnnnnnnnnnnnnnnnnnnnnnnnnnnnnnnnnnnnnnnnnnnnnnnnnnnnnnnnnnnnnnnnnnnnnnnnnnnnnnnnnnnnnnnnnnnnnnnnnnnnnnnnnnnnnnnnnnnnnnnnnnnnnnnnnnnnnnnnnnnnnnnnnnnnnnnnnnnnnnnnnnnnnnnnnnnnnnnnnnnnnnnnnnnnnnnnnnnnnnnnnnnnnnnnnnnnnnnnnnnnnnnnnnnnnnnnnnnnnnnnnnnnnnnnnnnnnnnnnnnnnnnnnnnnnnnnnnnnnnnnnnnnnnnnnnnnnnnnnnnnnnnnnnnnnnnnnnnnnnnnnnnnnnnnnnnnnnnnnnnnnnnnnnnnnnnnnnnnnnnnnnnnnnnnnnnnnnnnnnnnnnnnnnnnnnnnnnnnnnnnnnnnnnnnnnnnnnnnnnnnnnnnnnnnnnnnnnnnnnnnnnnnnnnnnnnnnnnnnnnnnnnnnnnnnnnnnnnnnnnnnnnnnnnnnnnnnnnnnnnnnnnnnnnnnnnnnnnnnnnnnnnnnnnnnnnnnnnnnnnnnnnnnnnnnnnnnnnnnnnnnnnnnnnnnnnnnnnnnnnnnnnnnnnnnnnnnnnnnnnnnnnnnnnnnnnnnnnnnnnnnnnnnnnnnnnnnnnnnnnnnnnnnnnnnnnnnnnnnnnnnnnnnnnnnnnnnnnnnnnnnnnnnnnnnnnnnnnnnnnnnnnnnnnnnnnnnnnnnnnnnnnnnnnnnnnnnnnnnnnnnnnnnnnnnnnnnnnnnnnnnnnnnnnnnnnnnnnnnnnnnnnnnnnnnnnnnnnnnnnnnnnnnnnnnnnnnnnnnnnnnnnnnnnnnnnnnnnnnnnnnnnnnnnnnnnnnnnnnnnnnnnnnnnnnnnnnnnnnnnnnnnnnnnnnnnnnnnnnnnnnnnnnnnnnnnnnnnnnnnnnnnnnnnnnnnnnnnnnnnnnnnnnnnnnnnnnnnnnnnnnnnnnnnnnnnnnnnnnnnnnnnnnnnnnnnnnnnnnnnnnnnnnnnnnnnnnnnnnnnnnnnnnnnnnnnnnnnnnnnnnnnnnnnnnnnnnnnnnnnnnnnnnnnnnnnnnnnnnnnnnnnnnnnnnnnnnnnnnnnnnnnnnnnnnnnnnnnnnnnnnnnnnnnnnnnnnnnnnnnnnnnnnnnnnnnnnnnnnnnnnnnnnnnnnnnnnnnnnnnnnnnnnnnnnnnnnnnnnnnnnnnnnnnnnnnnnnnnnnnnnnnnnnnnnnnnnnnnnnnnnnnnnnnnnnnnnnnnnnnnnnnnnnnnnnnnnnnnnnnnnnnnnnnnnnnnnnnnnnnnnnnnnnnnnnnnnnnnnnnnnnnnnnnnnnnnnnnnnnnnnnnnnnnnnnnnnnnnnnnnnnnnnnnnnnnnnnnnnnnnnnnnnnnnnnnnnnnnnnnnnnnnnnnnnnnnnnnnnnnnnnnnnnnnnnnnnnnnnnnnnnnnnnnnnnnnnnnnnnnnnnnnnnnnnnnnnnnnnnnnnnnnnnnnnnnnnnnnnnnnnnnnnnnnnnnnnnnnnnnnnnnnnnnnnnnnnnnnnnnnnnnnnnnnnnnnnnnnnnnnnnnnnnnnnnnnnnnnnnnnnnnnnnnnnnnnnnnnnnnnnnnnnnnnnnnnnnnnnnnnnnnnnnnnnnnnnnnnnnnnnnnnnnnnnnnnnnnnnnnnnnnnnnnnnnnnnnnnnnnnnnnnnnnnnnnnnnnnnnnnnnnnnnnnnnnnnnnnnnnnnnnnnnnnnnnnnnnnnnnnnnnnnnnnnnnnnnnnnnnnnnnnnnnnnnnnnnnnnnnnnnnnnnnnnnnnnnnnnnnnnnnnnnnnnnnnnnnnnnnnnnnnnnnnnnnnnnnnnnnnnnnnnnnnnnnnnnnnnnnnnnnnnnnnnnnnnnnnnnnnnnnnnnnnnnnnnnnnnnnnnnnnnnnnnnnnnnnnnnnnnnnnnnnnnnnnnnnnnnnnnnnnnnnnnnnnnnnnnnnnnnnnnnnnnnnnnnnnnnnnnnnnnnnnnnnnnnnnnnnnnnnnnnnnnnnnnnnnnnnnnnnnnnnnnnnnnnnnnnnnnnnnnnnnnnnnnnnnnnnnnnnnnnnnnnnnnnnnnnnnnnnnnnnnnnnnnnnnnnnnnnnnnnnnnnnnnnnnnnnnnnnnnnnnnnnnnnnnnnnnnnnnnnnnnnnnnnnnnnnnnnnnnnnnnnnnnnnnnnnnnnnnnnnnnnnnnnnnnnnnnnnnnnnnnnnnnnnnnnnnnnnnnnnnnnnnnnnnnnnnnnnnnnnnnnnnnnnnnnnnnnnnnnnnnnnnnnnnnnnnnnnnnnnnnnnnnnnnnnnnnnnnnnnnnnnnnnnnnnnnnnnnnnnnnnnnnnnnnnnnnnnnnnnnnnnnnnnnnnnnnnnnnnnnnnnnnnnnnnnnnnnnnnnnnnnnnnnnnnnnnnnnnnnnnnnnnnnnnnnnnnnnnnnnnnnnnnnnnnnnnnnnnnnnnnnnnnnnnnnnnnnnnnnnnnnnnnnnnnnnnnnnnnnnnnnnnnnnnnnnnnnnnnnnnnnnnnnnnnnnnnnnnnnnnnnnnnnnnnnnnnnnnnnnnnnnnnnnnnnnnnnnnnnnnnnnnnnnnnnnnnnnnnnnnnnnnnnnnnnnnnnnnnnnnnnnnnnnnnnnnnnnnnnnnnnnnnnnnnnnnnnnnnnnnnnnnnnnnnnnnnnnnnnnnnnnnnnnnnnnnnnnnnnnnnnnnnnnnnnnnnnnnnnnnnnnnnnnnnnnnnnnnnnnnnnnnnnnnnnnnnnnnnnnnnnnnnnnnnnnnnnnnnnnnnnnnnnnnnnnnnnnnnnnnnnnnnnnnnnnnnnnnnnnnnnnnnnnnnnnnnnnnnnnnnnnnnnnnnnnnnnnnnnnnnnnnnnnnnnnnnnnnnnnnnnnnnnnnnnnnnnnnnnnnnnnnnnnnnnnnnnnnnnnnnnnnnnnnnnnnnnnnnnnnnnnnnnnnnnnnnnnnnnnnnnnnnnnnnnnnnnnnnnnnnnnnnnnnnnnnnnnnnnnnnnnnnnnnnnnnnnnnnnnnnnnnnnnnnnnnnnnnnnnnnnnnnnnnnnnnnnnnnnnnnnnnnnnnnnnnnnnnnnnnnnnnnnnnnnnnnnnnnnnnnnnnnnnnnnnnnnnnnnnnnnnnnnnnnnnnnnnnnnnnnnnnnnnnnnnnnnnnnnnnnnnnnnnnnnnnnnnnnnnnnnnnnnnnnnnnnnnnnnnnnnnnnnnnnnnnnnnnnnnnnnnnnnnnnnnnnnnnnnnnnnnnnnnnnnnnnnnnnnnnnnnnnnnnnnnnnnnnnnnnnnnnnnnnnnnnnnnnnnnnnnnnnnnnnnnnnnnnnnnnnnnnnnnnnnnnnnnnnnnnnnnnnnnnnnnnnnnnnnnnnnnnnnnnnnnnnnnnnnnnnnnnnnnnnnnnnnnnnnnnnnnnnnnnnnnnnnnnnnnnnnnnnnnnnnnnnnnnnnnnnnnnnnnnnnnnnnnnnnnnnnnnnnnnnnnnnnnnnnnnnnnnnnnnnnnnnnnnnnnnnnnnnnnnnnnnnnnnnnnnnnnnnnnnnnnnnnnnnnnnnnnnnnnnnnnnnnnnnnnnnnnnnnnnnnnnnnnnnnnnnnnnnnnnnnnnnnnnnnnnnnnnnnnnnnnnnnnnnnnnnnnnnnnnnnnnnnnnnnnnnnnnnnnnnnnnnnnnnnnnnnnnnnnnnnnnnnnnnnnnnnnnnnnnnnnnnnnnnnnnnnnnnnnnnnnnnnnnnnnnnnnnnnnnnnnnnnnnnnnnnnnnnnnnnnnnnnnnnnnnnnnnnnnnnnnnnnnnnnnnnnnnnnnnnnnnnnnnnnnnnnnnnnnnnnnnnnnnnnnnnnnnnnnnnnnnnnnnnnnnnnnnnnnnnnnnnnnnnnnnnnnnnnnnnnnnnnnnnnnnnnnnnnnnnnnnnnnnnnnnnnnnnnnnnnnnnnnnnnnnnnnnnnnnnnnnnnnnnnnnnnnnnnnnnnnnnnnnnnnnnnnnnnnnnnnnnnnnnnnnnnnnnnnnnnnnnnnnnnnnnnnnnnnnnnnnnnnnnnnnnnnnnnnnnnnnnnnnnnnnnnnnnnnnnnnnnnnnnnnnnnnnnnnnnnnnnnnnnnnnnnnnnnnnnnnnnnnnnnnnnnnnnnnnnnnnnnnnnnnnnnnnnnnnnnnnnnnnnnnnnnnnnnnnnnnnnnnnnnnnnnnnnnnnnnnnnnnnnnnnnnnnnnnnnnnnnnnnnnnnnnnnnnnnnnnnnnnnnnnnnnnnnnnnnnnnnnnnnnnnnnnnnnnnnnnnnnnnnnnnnnnnnnnnnnnnnnnnnnnnnnnnnnnnnnnnnnnnnnnnnnnnnnnnnnnnnnnnnnnnnnnnnnnnnnnnnnnnnnnnnnnnnnnnnnnnnnnnnnnnnnnnnnnnnnnnnnnnnnnnnnnnnnnnnnnnnnnnnnnnnnnnnnnnnnnnnnnnnnnnnnnnnnnnnnnnnnnnnnnnnnnnnnnnnnnnnnnnnnnnnnnnnnnnnnnnnnnnnnnnnnnnnnnnnnnnnnnnnnnnnnnnnnnnnnnnnnnnnnnnnnnnnnnnnnnnnnnnnnnnnnnnnnnnnnnnnnnnnnnnnnnnnnnnnnnnnnnnnnnnnnnnnnnnnnnnnnnnnnnnnnnnnnnnnnnnnnnnnnnnnnnnnnnnnnnnnnnnnnnnnnnnnnnnnnnnnnnnnnnnnnnnnnnnnnnnnnnnnnnnnnnnnnnnnnnnnnnnnnnnnnnnnnnnnnnnnnnnnnnnnnnnnnnnnnnnnnnnnnnnnnnnnnnnnnnnnnnnnnnnnnnnnnnnnnnnnnnnnnnnnnnnnnnnnnnnnnnnnnnnnnnnnnnnnnnnnnnnnnnnnnnnnnnnnnnnnnnnnnnnnnnnnnnnnnnnnnnnnnnnnnnnnnnnnnnnnnnnnnnnnnnnnnnnnnnnnnnnnnnnnnnnnnnnnnnnnnnnnnnnnnnnnnnnnnnnnnnnnnnnnnnnnnnnnnnnnnnnnnnnnnnnnnnnnnnnnnnnnnnnnnnnnnnnnnnnnnnnnnnnnnnnnnnnnnnnnnnnnnnnnnnnnnnnnnnnnnnnnnnnnnnnnnnnnnnnnnnnnnnnnnnnnnnnnnnnnnnnnnnnnnnnnnnnnnnnnnnnnnnnnnnnnnnnnnnnnnnnnnnnnnnnnnnnnnnnnnnnnnnnnnnnnnnnnnnnnnnnnnnnnnnnnnnnnnnnnnnnnnnnnnnnnnnnnnnnnnnnnnnnnnnnnnnnnnnnnnnnnnnnnnnnnnnnnnnnnnnnnnnnnnnnnnnnnnnnnnnnnnnnnnnnnnnnnnnnnnnnnnnnnnnnnnnnnnnnnnnnnnnnnnnnnnnnnnnnnnnnnnnnnnnnnnnnnnnnnnnnnnnnnnnnnnnnnnnnnnnnnnnnnnnnnnnnnnnnnnnnnnnnnnnnnnnnnnnnnnnnnnnnnnnnnnnnnnnnnnnnnnnnnnnnnnnnnnnnnnnnnnnnnnnnnnnnnnnnnnnnnnnnnnnnnnnnnnnnnnnnnnnnnnnnnnnnnnnnnnnnnnnnnnnnnnnnnnnnnnnnnnnnnnnnnnnnnnnnnnnnnnnnnnnnnnnnnnnnnnnnnnnnnnnnnnnnnnnnnnnnnnnnnnnnnnnnnnnnnnnnnnnnnnnnnnnnnnnnnnnnnnnnnnnnnnnnnnnnnnnnnnnnnnnnnnnnnnnnnnnnnnnnnnnnnnnnnnnnnnnnnnnnnnnnnnnnnnnnnnnnnnnnnnnnnnnnnnnnnnnnnnnnnnnnnnnnnnnnnnnnnnnnnnnnnnnnnnnnnnnnnnnnnnnnnnnnnnnnnnnnnnnnnnnnnnnnnnnnnnnnnnnnnnnnnnnnnnnnnnnnnnnnnnnnnnnnnnnnnnnnnnnnnnnnnnnnnnnnnnnnnnnnnnnnnnnnnnnnnnnnnnnnnnnnnnnnnnnnnnnnnnnnnnnnnnnnnnnnnnnnnnnnnnnnnnnnnnnnnnnnnnnnnnnnnnnnnnnnnnnnnnnnnnnnnnnnnnnnnnnnnnnnnnnnnnnnnnnnnnnnnnnnnnnnnnnnnnnnnnnnnnnnnnnnnnnnnnnnnnnnnnnnnnnnnnnnnnnnnnnnnnnnnnnnnnnnnnnnnnnnnnnnnnnnnnnnnnnnnnnnnnnnnnnnnnnnnnnnnnnnnnnnnnnnnnnnnnnnnnnnnnnnnnnnnnnnnnnnnnnnnnnnnnnnnnnnnnnnnnnnnnnnnnnnnnnnnnnnnnnnnnnnnnnnnnnnnnnnnnnnnnnnnnnnnnnnnnnnnnnnnnnnnnnnnnnnnnnnnnnnnnnnnnnnnnnnnnnnnnnnnnnnnnnnnnnnnnnnnnnnnnnnnnnnnnnnnnnnnnnnnnnnnnnnnnnnnnnnnnnnnnnnnnnnnnnnnnnnnnnnnnnnnnnnnnnnnnnnnnnnnnnnnnnnnnnnnnnnnnnnnnnnnnnnnnnnnnnnnnnnnnnnnnnnnnnnnnnnnnnnnnnnnnnnnnnnnnnnnnnnnnnnnnnnnnnnnnnnnnnnnnnnnnnnnnnnnnnnnnnnnnnnnnnnnnnnnnnnnnnnnnnnnnnnnnnnnnnnnnnnnnnnnnnnnnnnnnnnnnnnnnnnnnnnnnnnnnnnnnnnnnnnnnnnnnnnnnnnnnnnnnnnnnnnnnnnnnnnnnnnnnnnnnnnnnnnnnnnnnnnnnnnnnnnnnnnnnnnnnnnnnnnnnnnnnnnnnnnnnnnnnnnnnnnnnnnnnnnnnnnnnnnnnnnnnnnnnnnnnnnnnnnnnnnnnnnnnnnnnnnnnnnnnnnnnnnnnnnnnnnnnnnnnnnnnnnnnnnnnnnnnnnnnnnnnnnnnnnnnnnnnnnnnnnnnnnnnnnnnnnnnnnnnnnnnnnnnnnnnnnnnnnnnnnnnnnnnnnnnnnnnnnnnnnnnnnnnnnnnnnnnnnnnnnnnnnnnnnnnnnnnnnnnnnnnnnnnnnnnnnnnnnnnnnnnnnnnnnnnnnnnnnnnnnnnnnnnnnnnnnnnnnnnnnnnnnnnnnnnnnnnnnnnnnnnnnnnnnnnnnnnnnnnnnnnnnnnnnnnnnnnnnnnnnnnnnnnnnnnnnnnnnnnnnnnnnnnnnnnnnnnnnnnnnnnnnnnnnnnnnnnnnnnnnnnnnnnnnnnnnnnnnnnnnnnnnnnnnnnnnnnnnnnnnnnnnnnnnnnnnnnnnnnnnnnnnnnnnnnnnnnnnnnnnnnnnnnnnnnnnnnnnnnnnnnnnnnnnnnnnnnnnnnnnnnnnnnnnnnnnnnnnnnnnnnnnnnnnnnnnnnnnnnnnnnnnnnnnnnnnnnnnnnnnnnnnnnnnnnnnnnnnnnnnnnnnnnnnnnnnnnnnnnnnnnnnnnnnnnnnnnnnnnnnnnnnnnnnnnnnnnnnnnnnnnnnnnnnnnnnnnnnnnnnnnnnnnnnnnnnnnnnnnnnnnnnnnnnnnnnnnnnnnnnnnnnnnnnnnnnnnnnnnnnnnnnnnnnnnnnnnnnnnnnnnnnnnnnnnnnnnnnnnnnnnnnnnnnnnnnnnnnnnnnnnnnnnnnnnnnnnnnnnnnnnnnnnnnnnnnnnnnnnnnnnnnnnnnnnnnnnnnnnnnnnnnnnnnnnnnnnnnnnnnnnnnnnnnnnnnnnnnnnnnnnnnnnnnnnnnnnnnnnnnnnnnnnnnnnnnnnnnnnnnnnnnnnnnnnnnnnnnnnnnnnnnnnnnnnnnnnnnnnnnnnnnnnnnnnnnnnnnnnnnnnnnnnnnnnnnnnnnnnnnnnnnnnnnnnnnnnnnnnnnnnnnnnnnnnnnnnnnnnnnnnnnnnnnnnnnnnnnnnnnnnnnnnnnnnnnnnnnnnnnnnnnnnnnnnnnnnnnnnnnnnnnnnnnnnnnnnnnnnnnnnnnnnnnnnnnnnnnnnnnnnnnnnnnnnnnnnnnnnnnnnnnnnnnnnnnnnnnnnnnnnnnnnnnnnnnnnnnnnnnnnnnnnnnnnnnnnnnnnnnnnnnnnnnnnnnnnnnnnnnnnnnnnnnnnnnnnnnnnnnnnnnnnnnnnnnnnnnnnnnnnnnnnnnnnnnnnnnnnnnnnnnnnnnnnnnnnnnnnnnnnnnnnnnnnnnnnnnnnnnnnnnnnnnnnnnnnnnnnnnnnnnnnnnnnnnnnnnnnnnnnnnnnnnnnnnnnnnnnnnnnnnnnnnnnnnnnnnnnnnnnnnnnnnnnnnnnnnnnnnnnnnnnnnnnnnnnnnnnnnnnnnnnnnnnnnnnnnnnnnnnnnnnnnnnnnnnnnnnnnnnnnnnnnnnnnnnnnnnnnnnnnnnnnnnnnnnnnnnnnnnnnnnnnnnnnnnnnnnnnnnnnnnnnnnnnnnnnnnnnnnnnnnnnnnnnnnnnnnnnnnnnnnnnnnnnnnnnnnnnnnnnnnnnnnnnnnnnnnnnnnnnnnnnnnnnnnnnnnnnnnnnnnnnnnnnnnnnnnnnnnnnnnnnnnnnnnnnnnnnnnnnnnnnnnnnnnnnnnnnnnnnnnnnnnnnnnnnnnnnnnnnnnnnnnnnnnnnnnnnnnnnnnnnnnnnnnnnnnnnnnnnnnnnnnnnnnnnnnnnnnnnnnnnnnnnnnnnnnnnnnnnnnnnnnnnnnnnnnnnnnnnnnnnnnnnnnnnnnnnnnnnnnnnnnnnnnnnnnnnnnnnnnnnnnnnnnnnnnnnnnnnnnnnnnnnnnnnnnnnnnnnnnnnnnnnnnnnnnnnnnnnnnnnnnnnnnnnnnnnnnnnnnnnnnnnnnnnnnnnnnnnnnnnnnnnnnnnnnnnnnnnnnnnnnnnnnnnnnnnnnnnnnnnnnnnnnnnnnnnnnnnnnnnnnnnnnnnnnnnnnnnnnnnnnnnnnnnnnnnnnnnnnnnnnnnnnnnnnnnnnnnnnnnnnnnnnnnnnnnnnnnnnnnnnnnnnnnnnnnnnnnnnnnnnnnnnnnnnnnnnnnnnnnnnnnnnnnnnnnnnnnnnnnnnnnnnnnnnnnnnnnnnnnnnnnnnnnnnnnnnnnnnnnnnnnnnnnnnnnnnnnnnnnnnnnnnnnnnnnnnnnnnnnnnnnnnnnnnnnnnnnnnnnnnnnnnnnnnnnnnnnnnnnnnnnnnnnnnnnnnnnnnnnnnnnnnnnnnnnnnnnnnnnnnnnnnnnnnnnnnnnnnnnnnnnnnnnnnnnnnnnnnnnnnnnnnnnnnnnnnnnnnnnnnnnnnnnnnnnnnnnnnnnnnnnnnnnnnnnnnnnnnnnnnnnnnnnnnnnnnnnnnnnnnnnnnnnnnnnnnnnnnnnnnnnnnnnnnnnnnnnnnnnnnnnnnnnnnnnnnnnnnnnnnnnnnnnnnnnnnnnnnnnnnnnnnnnnnnnnnnnnnnnnnnnnnnnnnnnnnnnnnnnnnnnnnnnnnnnnnnnnnnnnnnnnnnnnnnnnnnnnnnnnnnnnnnnnnnnnnnnnnnnnnnnnnnnnnnnnnnnnnnnnnnnnnnnnnnnnnnnnnnnnnnnnnnnnnnnnnnnnnnnnnnnnnnnnnnnnnnnnnnnnnnnnnnnnnnnnnnnnnnnnnnnnnnnnnnnnnnnnnnnnnnnnnnnnnnnnnnnnnnnnnnnnnnnnnnnnnnnnnnnnnnnnnnnnnnnnnnnnnnnnnnnnnnnnnnnnnnnnnnnnnnnnnnnnnnnnnnnnnnnnnnnnnnnnnnnnnnnnnnnnnnnnnnnnnnnnnnnnnnnnnnnnnnnnnnnnnnnnnnnnnnnnnnnnnnnnnnnnnnnnnnnnnnnnnnnnnnnnnnnnnnnnnnnnnnnnnnnnnnnnnnnnnnnnnnnnnnnnnnnnnnnnnnnnnnnnnnnnnnnnnnnnnnnnnnnnnnnnnnnnnnnnnnnnnnnnnnnnnnnnnnnnnnnnnnnnnnnnnnnnnnnnnnnnnnnnnnnnnnnnnnnnnnnnnnnnnnnnnnnnnnnnnnnnnnnnnnnnnnnnnnnnnnnnnnnnnnnnnnnnnnnnnnnnnnnnnnnnnnnnnnnnnnnnnnnnnnnnnnnnnnnnnnnnnnnnnnnnnnnnnnnnnnnnnnnnnnnnnnnnnnnnnnnnnnnnnnnnnnnnnnnnnnnnnnnnnnnnnnnnnnnnnnnnnnnnnnnnnnnnnnnnnnnnnnnnnnnnnnnnnnnnnnnnnnnnnnnnnnnnnnnnnnnnnnnnnnnnnnnnnnnnnnnnnnnnnnnnnnnnnnnnnnnnnnnnnnnnnnnnnnnnnnnnnnnnnnnnnnnnnnnnnnnnnnnnnnnnnnnnnnnnnnnnnnnnnnnnnnnnnnnnnnnnnnnnnnnnnnnnnnnnnnnnnnnnnnnnnnnnnnnnnnnnnnnnnnnnnnnnnnnnnnnnnnnnnnnnnnnnnnnnnnnnnnnnnnnnnnnnnnnnnnnnnnnnnnnnnnnnnnnnnnnnnnnnnnnnnnnnnnnnnnnnnnnnnnnnnnnnnnnnnnnnnnnnnnnnnnnnnnnnnnnnnnnnnnnnnnnnnnnnnnnnnnnnnnnnnnnnnnnnnnnnnnnnnnnnnnnnnnnnnnnnnnnnnnnnnnnnnnnnnnnnnnnnnnnnnnnnnnnnnnnnnnnnnnnnnnnnnnnnnnnnnnnnnnnnnnnnnnnnnnnnnnnnnnnnnnnnnnnnnnnnnnnnnnnnnnnnnnnnnnnnnnnnnnnnnnnnnnnnnnnnnnnnnnnnnnnnnnnnnnnnnnnnnnnnnnnnnnnnnnnnnnnnnnnnnnnnnnnnnnnnnnnnnnnnnnnnnnnnnnnnnnnnnnnnnnnnnnnnnnnnnnnnnnnnnnnnnnnnnnnnnnnnnnnnnnnnnnnnnnnnnnnnnnnnnnnnnnnnnnnnnnnnnnnnnnnnnnnnnnnnnnnnnnnnnnnnnnnnnnnnnnnnnnnnnnnnnnnnnnnnnnnnnnnnnnnnnnnnnnnnnnnnnnnnnnnnnnnnnnnnnnnnnnnnnnnnnnnnnnnnnnnnnnnnnnnnnnnnnnnnnnnnnnnnnnnnnnnnnnnnnnnnnnnnnnnnnnnnnnnnnnnnnnnnnnnnnnnnnnnnnnnnnnnnnnnnnnnnnnnnnnnnnnnnnnnnnnnnnnnnnnnnnnnnnnnnnnnnnnnnnnnnnnnnnnnnnnnnnnnnnnnnnnnnnnnnnnnnnnnnnnnnnnnnnnnnnnnnnnnnnnnnnnnnnnnnnnnnnnnnnnnnnnnnnnnnnnnnnnnnnnnnnnnnnnnnnnnnnnnnnnnnnnnnnnnnnnnnnnnnnnnnnnnnnnnnnnnnnnnnnnnnnnnnnnnnnnnnnnnnnnnnnnnnnnnnnnnnnnnnnnnnnnnnnnnnnnnnnnnnnnnnnnnnnnnnnnnnnnnnnnnnnnnnnnnnnnnnnnnnnnnnnnnnnnnnnnnnnnnnnnnnnnnnnnnnnnnnnnnnnnnnnnnnnnnnnnnnnnnnnnnnnnnnnnnnnnnnnnnnnnnnnnnnnnnnnnnnnnnnnnnnnnnnnnnnnnnnnnnnnnnnnnnnnnnnnnnnnnnnnnnnnnnnnnnnnnnnnnnnnnnnnnnnnnnnnnnnnnnnnnnnnnnnnnnnnnnnnnnnnnnnnnnnnnnnnnnnnnnnnnnnnnnnnnnnnnnnnnnnnnnnnnnnnnnnnnnnnnnnnnnnnnnnnnnnnnnnnnnnnnnnnnnnnnnnnnnnnnnnnnnnnnnnnnnnnnnnnnnnnnnnnnnnnnnnnnnnnnnnnnnnnnnnnnnnnnnnnnnnnnnnnnnnnnnnnnnnnnnnnnnnnnnnnnnnnnnnnnnnnnnnnnnnnnnnnnnnnnnnnnnnnnnnnnnnnnnnnnnnnnnnnnnnnnnnnnnnnnnnnnnnnnnnnnnnnnnnnnnnnnnnnnnnnnnnnnnnnnnnnnnnnnnnnnnnnnnnnnnnnnnnnnnnnnnnnnnnnnnnnnnnnnnnnnnnnnnnnnnnnnnnnnnnnnnnnnnnnnnnnnnnnnnnnnnnnnnnnnnnnnnnnnnnnnnnnnnnnnnnnnnnnnnnnnnnnnnnnnnnnnnnnnnnnnnnnnnnnnnnnnnnnnnnnnnnnnnnnnnnnnnnnnnnnnnnnnnnnnnnnnnnnnnnnnnnnnnnnnnnnnnnnnnnnnnnnnnnnnnnnnnnnnnnnnnnnnnnnnnnnnnnnnnnnnnnnnnnnnnnnnnnnnnnnnnnnnnnnnnnnnnnnnnnnnnnnnnnnnnnnnnnnnnnnnnnnnnnnnnnnnnnnnnnnnnnnnnnnnnnnnnnnnnnnnnnnnnnnnnnnnnnnnnnnnnnnnnnnnnnnnnnnnnnnnnnnnnnnnnnnnnnnnnnnnnnnnnnnnnnnnnnnnnnnnnnnnnnnnnnnnnnnnnnnnnnnnnnnnnnnnnnnnnnnnnnnnnnnnnnnnnnnnnnnnnnnnnnnnnnnnnnnnnnnnnnnnnnnnnnnnnnnnnnnnnnnnnnnnnnnnnnnnnnnnnnnnnnnnnnnnnnnnnnnnnnnnnnnnnnnnnnnnnnnnnnnnnnnnnnnnnnnnnnnnnnnnnnnnnnnnnnnnnnnnnnnnnnnnnnnnnnnnnnnnnnnnnnnnnnnnnnnnnnnnnnnnnnnnnnnnnnnnnnnnnnnnnnnnnnnnnnnnnnnnnnnnnnnnnnnnnnnnnnnnnnnnnnnnnnnnnnnnnnnnnnnnnnnnnnnnnnnnnnnnnnnnnnnnnnnnnnnnnnnnnnnnnnnnnnnnnnnnnnnnnnnnnnnnnnnnnnnnnnnnnnnnnnnnnnnnnnnnnnnnnnnnnnnnnnnnnnnnnnnnnnnnnnnnnnnnnnnnnnnnnnnnnnnnnnnnnnnnnnnnnnnnnnnnnnnnnnnnnnnnnnnnnnnnnnnnnnnnnnnnnnnnnnnnnnnnnnnnnnnnnnnnnnnnnnnnnnnnnnnnnnnnnnnnnnnnnnnnnnnnnnnnnnnnnnnnnnnnnnnnnnnnnnnnnnnnnnnnnnnnnnnnnnnnnnnnnnnnnnnnnnnnnnnnnnnnnnnnnnnnnnnnnnnnnnnnnnnnnnnnnnnnnnnnnnnnnnnnnnnnnnnnnnnnnnnnnnnnnnnnnnnnnnnnnnnnnnnnnnnnnnnnnnnnnnnnnnnnnnnnnnnnnnnnnnnnnnnnnnnnnnnnnnnnnnnnnnnnnnnnnnnnnnnnnnnnnnnnnnnnnnnnnnnnnnnnnnnnnnnnnnnnnnnnnnnnnnnnnnnnnnnnnnnnnnnnnnnnnnnnnnnnnnnnnnnnnnnnnnnnnnnnnnnnnnnnnnnnnnnnnnnnnnnnnnnnnnnnnnnnnnnnnnnnnnnnnnnnnnnnnnnnnnnnnnnnnnnnnnnnnnnnnnnnnnnnnnnnnnnnnnnnnnnnnnnnnnnnnnnnnnnnnnnnnnnnnnnnnnnnnnnnnnnnnnnnnnnnnnnnnnnnnnnnnnnnnnnnnnnnnnnnnnnnnnnnnnnnnnnnnnnnnnnnnnnnnnnnnnnnnnnnnnnnnnnnnnnnnnnnnnnnnnnnnnnnnnnnnnnnnnnnnnnnnnnnnnnnnnnnnnnnnnnnnnnnnnnnnnnnnnnnnnnnnnnnnnnnnnnnnnnnnnnnnnnnnnnnnnnnnnnnnnnnnnnnnnnnnnnnnnnnnnnnnnnnnnnnnnnnnnnnnnnnnnnnnnnnnnnnnnnnnnnnnnnnnnnnnnnnnnnnnnnnnnnnnnnnnnnnnnnnnnnnnnnnnnnnnnnnnnnnnnnnnnnnnnnnnnnnnnnnnnnnnnnnnnnnnnnnnnnnnnnnnnnnnnnnnnnnnnnnnnnnnnnnnnnnnnnnnnnnnnnnnnnnnnnnnnnnnnnnnnnnnnnnnnnnnnnnnnnnnnnnnnnnnnnnnnnnnnnnnnnnnnnnnnnnnnnnnnnnnnnnnnnnnnnnnnnnnnnnnnnnnnnnnnnnnnnnnnnnnnnnnnnnnnnnnnnnnnnnnnnnnnnnnnnnnnnnnnnnnnnnnnnnnnnnnnnnnnnnnnnnnnnnnnnnnnnnnnnnnnnnnnnnnnnnnnnnnnnnnnnnnnnnnnnnnnnnnnnnnnnnnnnnnnnnnnnnnnnnnnnnnnnnnnnnnnnnnnnnnnnnnnnnnnnnnnnnnnnnnnnnnnnnnnnnnnnnnnnnnnnnnnnnnnnnnnnnnnnnnnnnnnnnnnnnnnnnnnnnnnnnnnnnnnnnnnnnnnnnnnnnnnnnnnnnnnnnnnnnnnnnnnnnnnnnnnnnnnnnnnnnnnnnnnnnnnnnnnnnnnnnnnnnnnnnnnnnnnnnnnnnnnnnnnnnnnnnnnnnnnnnnnnnnnnnnnnnnnnnnnnnnnnnnnnnnnnnnnnnnnnnnnnnnnnnnnnnnnnnnnnnnnnnnnnnnnnnnnnnnnnnnnnnnnnnnnnnnnnnnnnnnnnnnnnnnnnnnnnnnnnnnnnnnnnnnnnnnnnnnnnnnnnnnnnnnnnnnnnnnnnnnnnnnnnnnnnnnnnnnnnnnnnnnnnnnnnnnnnnnnnnnnnnnnnnnnnnnnnnnnnnnnnnnnnnnnnnnnnnnnnnnnnnnnnnnnnnnnnnnnnnnnnnnnnnnnnnnnnnnnnnnnnnnnnnnnnnnnnnnnnnnnnnnnnnnnnnnnnnnnnnnnnnnnnnnnnnnnnnnnnnnnnnnnnnnnnnnnnnnnnnnnnnnnnnnnnnnnnnnnnnnnnnnnnnnnnnnnnnnnnnnnnnnnnnnnnnnnnnnnnnnnnnnnnnnnnnnnnnnnnnnnnnnnnnnnnnnnnnnnnnnnnnnnnnnnnnnnnnnnnnnnnnnnnnnnnnnnnnnnnnnnnnnnnnnnnnnnnnnnnnnnnnnnnnnnnnnnnnnnnnnnnnnnnnnnnnnnnnnnnnnnnnnnnnnnnnnnnnnnnnnnnnnnnnnnnnnnnnnnnnnnnnnnnnnnnnnnnnnnnnnnnnnnnnnnnnnnnnnnnnnnnnnnnnnnnnnnnnnnnnnnnnnnnnnnnnnnnnnnnnnnnnnnnnnnnnnnnnnnnnnnnnnnnnnnnnnnnnnnnnnnnnnnnnnnnnnnnnnnnnnnnnnnnnnnnnnnnnnnnnnnnnnnnnnnnnnnnnnnnnnnnnnnnnnnnnnnnnnnnnnnnnnnnnnnnnnnnnnnnnnnnnnnnnnnnnnnnnnnnnnnnnnnnnnnnnnnnnnnnnnnnnnnnnnnnnnnnnnnnnnnnnnnnnnnnnnnnnnnnnnnnnnnnnnnnnnnnnnnnnnnnnnnnnnnnnnnnnnnnnnnnnnnnnnnnnnnnnnnnnnnnnnnnnnnnnnnnnnnnnnnnnnnnnnnnnnnnnnnnnnnnnnnnnnnnnnnnnnnnnnnnnnnnnnnnnnnnnnnnnnnnnnnnnnnnnnnnnnnnnnnnnnnnnnnnnnnnnnnnnnnnnnnnnnnnnnnnnnnnnnnnnnnnnnnnnnnnnnnnnnnnnnnnnnnnnnnnnnnnnnnnnnnnnnnnnnnnnnnnnnnnnnnnnnnnnnnnnnnnnnnnnnnnnnnnnnnnnnnnnnnnnnnnnnnnnnnnnnnnnnnnnnnnnnnnnnnnnnnnnnnnnnnnnnnnnnnnnnnnnnnnnnnnnnnnnnnnnnnnnnnnnnnnnnnnnnnnnnnnnnnnnnnnnnnnnnnnnnnnnnnnnnnnnnnnnnnnnnnnnnnnnnnnnnnnnnnnnnnnnnnnnnnnnnnnnnnnnnnnnnnnnnnnnnnnnnnnnnnnnnnnnnnnnnnnnnnnnnnnnnnnnnnnnnnnnnnnnnnnnnnnnnnnnnnnnnnnnnnnnnnnnnnnnnnnnnnnnnnnnnnnnnnnnnnnnnnnnnnnnnnnnnnnnnnnnnnnnnnnnnnnnnnnnnnnnnnnnnnnnnnnnnnnnnnnnnnnnnnnnnnnnnnnnnnnnnnnnnnnnnnnnnnnnnnnnnnnnnnnnnnnnnnnnnnnnnnnnnnnnnnnnnnnnnnnnnnnnnnnnnnnnnnnnnnnnnnnnnnnnnnnnnnnnnnnnnnnnnnnnnnnnnnnnnnnnnnnnnnnnnnnnnnnnnnnnnnnnnnnnnnnnnnnnnnnnnnnnnnnnnnnnnnnnnnnnnnnnnnnnnnnnnnnnnnnnnnnnnnnnnnnnnnnnnnnnnnnnnnnnnnnnnnnnnnnnnnnnnnnnnnnnnnnnnnnnnnnnnnnnnnnnnnnnnnnnnnnnnnnnnnnnnnnnnnnnnnnnnnnnnnnnnnnnnnnnnnnnnnnnnnnnnnnnnnnnnnnnnnnnnnnnnnnnnnnnnnnnnnnnnnnnnnnnnnnnnnnnnnnnnnnnnnnnnnnnnnnnnnnnnnnnnnnnnnnnnnnnnnnnnnnnnnnnnnnnnnnnnnnnnnnnnnnnnnnnnnnnnnnnnnnnnnnnnnnnnnnnnnnnnnnnnnnnnnnnnnnnnnnnnnnnnnnnnnnnnnnnnnnnnnnnnnnnnnnnnnnnnnnnnnnnnnnnnnnnnnnnnnnnnnnnnnnnnnnnnnnnnnnnnnnnnnnnnnnnnnnnnnnnnnnnnnnnnnnnnnnnnnnnnnnnnnnnnnnnnnnnnnnnnnnnnnnnnnnnnnnnnnnnnnnnnnnnnnnnnnnnnnnnnnnnnnnnnnnnnnnnnnnnnnnnnnnnnnnnnnnnnnnnnnnnnnnnnnnnnnnnnnnnnnnnnnnnnnnnnnnnnnnnnnnnnnnnnnnnnnnnnnnnnnnnnnnnnnnnnnnnnnnnnnnnnnnnnnnnnnnnnnnnnnnnnnnnnnnnnnnnnnnnnnnnnnnnnnnnnnnnnnnnnnnnnnnnnnnnnnnnnnnnnnnnnnnnnnnnnnnnnnnnnnnnnnnnnnnnnnnnnnnnnnnnnnnnnnnnnnnnnnnnnnnnnnnnnnnnnnnnnnnnnnnnnnnnnnnnnnnnnnnnnnnnnnnnnnnnnnnnnnnnnnnnnnnnnnnnnnnnnnnnnnnnnnnnnnnnnnnnnnnnnnnnnnnnnnnnnnnnnnnnnnnnnnnnnnnnnnnnnnnnnnnnnnnnnnnnnnnnnnnnnnnnnnnnnnnnnnnnnnnnnnnnnnnnnnnnnnnnnnnnnnnnnnnnnnnnnnnnnnnnnnnnnnnnnnnnnnnnnnnnnnnnnnnnnnnnnnnnnnnnnnnnnnnnnnnnnnnnnnnnnnnnnnnnnnnnnnnnnnnnnnnnnnnnnnnnnnnnnnnnnnnnnnnnnnnnnnnnnnnnnnnnnnnnnnnnnnnnnnnnnnnnnnnnnnnnnnnnnnnnnnnnnnnnnnnnnnnnnnnnnnnnnnnnnnnnnnnnnnnnnnnnnnnnnnnnnnnnnnnnnnnnnnnnnnnnnnnnnnnnnnnnnnnnnnnnnnnnnnnnnnnnnnnnnnnnnnnnnnnnnnnnnnnnnnnnnnnnnnnnnnnnnnnnnnnnnnnnnnnnnnnnnnnnnnnnnnnnnnnnnnnnnnnnnnnnnnnnnnnnnnnnnnnnnnnnnnnnnnnnnnnnnnnnnnnnnnnnnnnnnnnnnnnnnnnnnnnnnnnnnnnnnnnnnnnnnnnnnnnnnnnnnnnnnnnnnnnnnnnnnnnnnnnnnnnnnnnnnnnnnnnnnnnnnnnnnnnnnnnnnnnnnnnnnnnnnnnnnnnnnnnnnnnnnnnnnnnnnnnnnnnnnnnnnnnnnnnnnnnnnnnnnnnnnnnnnnnnnnnnnnnnnnnnnnnnnnnnnnnnnnnnnnnnnnnnnnnnnnnnnnnnnnnnnnnnnnnnnnnnnnnnnnnnnnnnnnnnnnnnnnnnnnnnnnnnnnnnnnnnnnnnnnnnnnnnnnnnnnnnnnnnnnnnnnnnnnnnnnnnnnnnnnnnnnnnnnnnnnnnnnnnnnnnnnnnnnnnnnnnnnnnnnnnnnnnnnnnnnnnnnnnnnnnnnnnnnnnnnnnnnnnnnnnnnnnnnnnnnnnnnnnnnnnnnnnnnnnnnnnnnnnnnnnnnnnnnnnnnnnnnnnnnnnnnnnnnnnnnnnnnnnnnnnnnnnnnnnnnnnnnnnnnnnnnnnnnnnnnnnnnnnnnnnnnnnnnnnnnnnnnnnnnnnnnnnnnnnnnnnnnnnnnnnnnnnnnnnnnnnnnnnnnnnnnnnnnnnnnnnnnnnnnnnnnnnnnnnnnnnnnnnnnnnnnnnnnnnnnnnnnnnnnnnnnnnnnnnnnnnnnnnnnnnnnnnnnnnnnnnnnnnnnnnnnnnnnnnnnnnnnnnnnnnnnnnnnnnnnnnnnnnnnnnnnnnnnnnnnnnnnnnnnnnnnnnnnnnnnnnnnnnnnnnnnnnnnnnnnnnnnnnnnnnnnnnnnnnnnnnnnnnnnnnnnnnnnnnnnnnnnnnnnnnnnnnnnnnnnnnnnnnnnnnnnnnnnnnnnnnnnnnnnnnnnnnnnnnnnnnnnnnnnnnnnnnnnnnnnnnnnnnnnnnnnnnnnnnnnnnnnnnnnnnnnnnnnnnnnnnnnnnnnnnnnnnnnnnnnnnnnnnnnnnnnnnnnnnnnnnnnnnnnnnnnnnnnnnnnnnnnnnnnnnnnnnnnnnnnnnnnnnnnnnnnnnnnnnnnnnnnnnnnnnnnnnnnnnnnnnnnnnnnnnnnnnnnnnnnnnnnnnnnnnnnnnnnnnnnnnnnnnnnnnnnnnnnnnnnnnnnnnnnnnnnnnnnnnnnnnnnnnnnnnnnnnnnnnnnnnnnnnnnnnnnnnnnnnnnnnnnnnnnnnnnnnnnnnnnnnnnnnnnnnnnnnnnnnnnnnnnnnnnnnnnnnnnnnnnnnnnnnnnnnnnnnnnnnnnnnnnnnnnnnnnnnnnnnnnnnnnnnnnnnnnnnnnnnnnnnnnnnnnnnnnnnnnnnnnnnnnnnnnnnnnnnnnnnnnnnnnnnnnnnnnnnnnnnnnnnnnnnnnnnnnnnnnnnnnnnnnnnnnnnnnnnnnnnnnnnnnnnnnnnnnnnnnnnnnnnnnnnnnnnnnnnnnnnnnnnnnnnnnnnnnnnnnnnnnnnnnnnnnnnnnnnnnnnnnnnnnnnnnnnnnnnnnnnnnnnnnnnnnnnnnnnnnnnnnnnnnnnnnnnnnnnnnnnnnnnnnnnnnnnnnnnnnnnnnnnnnnnnnnnnnnnnnnnnnnnnnnnnnnnnnnnnnnnnnnnnnnnnnnnnnnnnnnnnnnnnnnnnnnnnnnnnnnnnnnnnnnnnnnnnnnnnnnnnnnnnnnnnnnnnnnnnnnnnnnnnnnnnnnnnnnnnnnnnnnnnnnnnnnnnnnnnnnnnnnnnnnnnnnnnnnnnnnnnnnnnnnnnnnnnnnnnnnnnnnnnnnnnnnnnnnnnnnnnnnnnnnnnnnnnnnnnnnnnnnnnnnnnnnnnnnnnnnnnnnnnnnnnnnnnnnnnnnnnnnnnnnnnnnnnnnnnnnnnnnnnnnnnnnnnnnnnnnnnnnnnnnnnnnnnnnnnnnnnnnnnnnnnnnnnnnnnnnnnnnnnnnnnnnnnnnnnnnnnnnnnnnnnnnnnnnnnnnnnnnnnnnnnnnnnnnnnnnnnnnnnnnnnnnnnnnnnnnnnnnnnnnnnnnnnnnnnnnnnnnnnnnnnnnnnnnnnnnnnnnnnnnnnnnnnnnnnnnnnnnnnnnnnnnnnnnnnnnnnnnnnnnnnnnnnnnnnnnnnnnnnnnnnnnnnnnnnnnnnnnnnnnnnnnnnnnnnnnnnnnnnnnnnnnnnnnnnnnnnnnnnnnnnnnnnnnnnnnnnnnnnnnnnnnnnnnnnnnnnnnnnnnnnnnnnnnnnnnnnnnnnnnnnnnnnnnnnnnnnnnnnnnnnnnnnnnnnnnnnnnnnnnnnnnnnnnnnnnnnnnnnnnnnnnnnnnnnnnnnnnnnnnnnnnnnnnnnnnnnnnnnnnnnnnnnnnnnnnnnnnnnnnnnnnnnnnnnnnnnnnnnnnnnnnnnnnnnnnnnnnnnnnnnnnnnnnnnnnnnnnnnnnnnnnnnnnnnnnnnnnnnnnnnnnnnnnnnnnnnnnnnnnnnnnnnnnnnnnnnnnnnnnnnnnnnnnnnnnnnnnnnnnnnnnnnnnnnnnnnnnnnnnnnnnnnnnnnnnnnnnnnnnnnnnnnnnnnnnnnnnnnnnnnnnnnnnnnnnnnnnnnnnnnnnnnnnnnnnnnnnnnnnnnnnnnnnnnnnnnnnnnnnnnnnnnnnnnnnnnnnnnnnnnnnnnnnnnnnnnnnnnnnnnnnnnnnnnnnnnnnnnnnnnnnnnnnnnnnnnnnnnnnnnnnnnnnnnnnnnnnnnnnnnnnnnnnnnnnnnnnnnnnnnnnnnnnnnnnnnnnnnnnnnnnnnnnnnnnnnnnnnnnnnnnnnnnnnnnnnnnnnnnnnnnnnnnnnnnnnnnnnnnnnnnnnnnnnnnnnnnnnnnnnnnnnnnnnnnnnnnnnnnnnnnnnnnnnnnnnnnnnnnnnnnnnnnnnnnnnnnnnnnnnnnnnnnnnnnnnnnnnnnnnnnnnnnnnnnnnnnnnnnnnnnnnnnnnnnnnnnnnnnnnnnnnnnnnnnnnnnnnnnnnnnnnnnnnnnnnnnnnnnnnnnnnnnnnnnnnnnnnnnnnnnnnnnnnnnnnnnnnnnnnnnnnnnnnnnnnnnnnnnnnnnnnnnnnnnnnnnnnnnnnnnnnnnnnnnnnnnnnnnnnnnnnnnnnnnnnnnnnnnnnnnnnnnnnnnnnnnnnnnnnnnnnnnnnnnnnnnnnnnnnnnnnnnnnnnnnnnnnnnnnnnnnnnnnnnnnnnnnnnnnnnnnnnnnnnnnnnnnnnnnnnnnnnnnnnnnnnnnnnnnnnnnnnnnnnnnnnnnnnnnnnnnnnnnnnnnnnnnnnnnnnnnnnnnnnnnnnnnnnnnnnnnnnnnnnnnnnnnnnnnnnnnnnnnnnnnnnnnnnnnnnnnnnnnnnnnnnnnnnnnnnnnnnnnnnnnnnnnnnnnnnnnnnnnnnnnnnnnnnnnnnnnnnnnnnnnnnnnnnnnnnnnnnnnnnnnnnnnnnnnnnnnnnnnnnnnnnnnnnnnnnnnnnnnnnnnnnnnnnnnnnnnnnnnnnnnnnnnnnnnnnnnnnnnnnnnnnnnnnnnnnnnnnnnnnnnnnnnnnnnnnnnnnnnnnnnnnnnnnnnnnnnnnnnnnnnnnnnnnnnnnnnnnnnnnnnnnnnnnnnnnnnnnnnnnnnnnnnnnnnnnnnnnnnnnnnnnnnnnnnnnnnnnnnnnnnnnnnnnnnnnnnnnnnnnnnnnnnnnnnnnnnnnnnnnnnnnnnnnnnnnnnnnnnnnnnnnnnnnnnnnnnnnnnnnnnnnnnnnnnnnnnnnnnnnnnnnnnnnnnnnnnnnnnnnnnnnnnnnnnnnnnnnnnnnnnnnnnnnnnnnnnnnnnnnnnnnnnnnnnnnnnnnnnnnnnnnnnnnnnnnnnnnnnnnnnnnnnnnnnnnnnnnnnnnnnnnnnnnnnnnnnnnnnnnnnnnnnnnnnnnnnnnnnnnnnnnnnnnnnnnnnnnnnnnnnnnnnnnnnnnnnnnnnnnnnnnnnnnnnnnnnnnnnnnnnnnnnnnnnnnnnnnnnnnnnnnnnnnnnnnnnnnnnnnnnnnnnnnnnnnnnnnnnnnnnnnnnnnnnnnnnnnnnnnnnnnnnnnnnnnnnnnnnnnnnnnnnnnnnnnnnnnnnnnnnnnnnnnnnnnnnnnnnnnnnnnnnnnnnnnnnnnnnnnnnnnnnnnnnnnnnnnnnnnnnnnnnnnnnnnnnnnnnnnnnnnnnnnnnnnnnnnnnnnnnnnnnnnnnnnnnnnnnnnnnnnnnnnnnnnnnnnnnnnnnnnnnnnnnnnnnnnnnnnnnnnnnnnnnnnnnnnnnnnnnnnnnnnnnnnnnnnnnnnnnnnnnnnnnnnnnnnnnnnnnnnnnnnnnnnnnnnnnnnnnnnnnnnnnnnnnnnnnnnnnnnnnnnnnnnnnnnnnnnnnnnnnnnnnnnnnnnnnnnnnnnnnnnnnnnnnnnnnnnnnnnnnnnnnnnnnnnnnnnnnnnnnnnnnnnnnnnnnnnnnnnnnnnnnnnnnnnnnnnnnnnnnnnnnnnnnnnnnnnnnnnnnnnnnnnnnnnnnnnnnnnnnnnnnnnnnnnnnnnnnnnnnnnnnnnnnnnnnnnnnnnnnnnnnnnnnnnnnnnnnnnnnnnnnnnnnnnnnnnnnnnnnnnnnnnnnnnnnnnnnnnnnnnnnnnnnnnnnnnnnnnnnnnnnnnnnnnnnnnnnnnnnnnnnnnnnnnnnnnnnnnnnnnnnnnnnnnnnnnnnnnnnnnnnnnnnnnnnnnnnnnnnnnnnnnnnnnnnnnnnnnnnnnnnnnnnnnnnnnnnnnnnnnnnnnnnnnnnnnnnnnnnnnnnnnnnnnnnnnnnnnnnnnnnnnnnnnnnnnnnnnnnnnnnnnnnnnnnnnnnnnnnnnnnnnnnnnnnnnnnnnnnnnnnnnnnnnnnnnnnnnnnnnnnnnnnnnnnnnnnnnnnnnnnnnnnnnnnnnnnnnnnnnnnnnnnnnnnnnnnnnnnnnnnnnnnnnnnnnnnnnnnnnnnnnnnnnnnnnnnnnnnnnnnnnnnnnnnnnnnnnnnnnnnnnnnnnnnnnnnnnnnnnnnnnnnnnnnnnnnnnnnnnnnnnnnnnnnnnnnnnnnnnnnnnnnnnnnnnnnnnnnnnnnnnnnnnnnnnnnnnnnnnnnnnnnnnnnnnnnnnnnnnnnnnnnnnnnnnnnnnnnnnnnnnnnnnnnnnnnnnnnnnnnnnnnnnnnnnnnnnnnnnnnnnnnnnnnnnnnnnnnnnnnnnnnnnnnnnnnnnnnnnnnnnnnnnnnnnnnnnnnnnnnnnnnnnnnnnnnnnnnnnnnnnnnnnnnnnnnnnnnnnnnnnnnnnnnnnnnnnnnnnnnnnnnnnnnnnnnnnnnnnnnnnnnnnnnnnnnnnnnnnnnnnnnnnnnnnnnnnnnnnnnnnnnnnnnnnnnnnnnnnnnnnnnnnnnnnnnnnnnnnnnnnnnnnnnnnnnnnnnnnnnnnnnnnnnnnnnnnnnnnnnnnnnnnnnnnnnnnnnnnnnnnnnnnnnnnnnnnnnnnnnnnnnnnnnnnnnnnnnnnnnnnnnnnnnnnnnnnnnnnnnnnnnnnnnnnnnnnnnnnnnnnnnnnnnnnnnnnnnnnnnnnnnnnnnnnnnnnnnnnnnnnnnnnnnnnnnnnnnnnnnnnnnnnnnnnnnnnnnnnnnnnnnnnnnnnnnnnnnnnnnnnnnnnnnnnnnnnnnnnnnnnnnnnnnnnnnnnnnnnnnnnnnnnnnnnnnnnnnnnnnnnnnnnnnnnnnnnnnnnnnnnnnnnnnnnnnnnnnnnnnnnnnnnnnnnnnnnnnnnnnnnnnnnnnnnnnnnnnnnnnnnnnnnnnnnnnnnnnnnnnnnnnnnnnnnnnnnnnnnnnnnnnnnnnnnnnnnnnnnnnnnnnnnnnnnnnnnnnnnnnnnnnnnnnnnnnnnnnnnnnnnnnnnnnnnnnnnnnnnnnnnnnnnnnnnnnnnnnnnnnnnnnnnnnnnnnnnnnnnnnnnnnnnnnnnnnnnnnnnnnnnnnnnnnnnnnnnnnnnnnnnnnnnnnnnnnnnnnnnnnnnnnnnnnnnnnnnnnnnnnnnnnnnnnnnnnnnnnnnnnnnnnnnnnnnnnnnnnnnnnnnnnnnnnnnnnnnnnnnnnnnnnnnnnnnnnnnnnnnnnnnnnnnnnnnnnnnnnnnnnnnnnnnnnnnnnnnnnnnnnnnnnnnnnnnnnnnnnnnnnnnnnnnnnnnnnnnnnnnnnnnnnnnnnnnnnnnnnnnnnnnnnnnnnnnnnnnnnnnnnnnnnnnnnnnnnnnnnnnnnnnnnnnnnnnnnnnnnnnnnnnnnnnnnnnnnnnnnnnnnnnnnnnnnnnnnnnnnnnnnnnnnnnnnnnnnnnnnnnnnnnnnnnnnnnnnnnnnnnnnnnnnnnnnnnnnnnnnnnnnnnnnnnnnnnnnnnnnnnnnnnnnnnnnnnnnnnnnnnnnnnnnnnnnnnnnnnnnnnnnnnnnnnnnnnnnnnnnnnnnnnnnnnnnnnnnnnnnnnnnnnnnnnnnnnnnnnnnnnnnnnnnnnnnnnnnnnnnnnnnnnnnnnnnnnnnnnnnnnnnnnnnnnnnnnnnnnnnnnnnnnnnnnnnnnnnnnnnnnnnnnnnnnnnnnnnnnnnnnnnnnnnnnnnnnnnnnnnnnnnnnnnnnnnnnnnnnnnnnnnnnnnnnnnnnnnnnnnnnnnnnnnnnnnnnnnnnnnnnnnnnnnnnnnnnnnnnnnnnnnnnnnnnnnnnnnnnnnnnnnnnnnnnnnnnnnnnnnnnnnnnnnnnnnnnnnnnnnnnnnnnnnnnnnnnnnnnnnnnnnnnnnnnnnnnnnnnnnnnnnnnnnnnnnnnnnnnnnnnnnnnnnnnnnnnnnnnnnnnnnnnnnnnnnnnnnnnnnnnnnnnnnnnnnnnnnnnnnnnnnnnnnnnnnnnnnnnnnnnnnnnnnnnnnnnnnnnnnnnnnnnnnnnnnnnnnnnnnnnnnnnnnnnnnnnnnnnnnnnnnnnnnnnnnnnnnnnnnnnnnnnnnnnnnnnnnnnnnnnnnnnnnnnnnnnnnnnnnnnnnnnnnnnnnnnnnnnnnnnnnnnnnnnnnnnnnnnnnnnnnnnnnnnnnnnnnnnnnnnnnnnnnnnnnnnnnnnnnnnnnnnnnnnnnnnnnnnnnnnnnnnnnnnnnnnnnnnnnnnnnnnnnnnnnnnnnnnnnnnnnnnnnnnnnnnnnnnnnnnnnnnnnnnnnnnnnnnnnnnnnnnnnnnnnnnnnnnnnnnnnnnnnnnnnnnnnnnnnnnnnnnnnnnnnnnnnnnnnnnnnnnnnnnnnnnnnnnnnnnnnnnnnnnnnnnnnnnnnnnnnnnnnnnnnnnnnnnnnnnnnnnnnnnnnnnnnnnnnnnnnnnnnnnnnnnnnnnnnnnnnnnnnnnnnnnnnnnnnnnnnnnnnnnnnnnnnnnnnnnnnnnnnnnnnnnnnnnnnnnnnnnnnnnnnnnnnnnnnnnnnnnnnnnnnnnnnnnnnnnnnnnnnnnnnnnnnnnnnnnnnnnnnnnnnnnnnnnnnnnnnnnnnnnnnnnnnnnnnnnnnnnnnnnnnnnnnnnnnnnnnnnnnnnnnnnnnnnnnnnnnnnnnnnnnnnnnnnnnnnnnnnnnnnnnnnnnnnnnnnnnnnnnnnnnnnnnnnnnnnnnnnnnnnnnnnnnnnnnnnnnnnnnnnnnnnnnnnnnnnnnnnnnnnnnnnnnnnnnnnnnnnnnnnnnnnnnnnnnnnnnnnnnnnnnnnnnnnnnnnnnnnnnnnnnnnnnnnnnnnnnnnnnnnnnnnnnnnnnnnnnnnnnnnnnnnnnnnnnnnnnnnnnnnnnnnnnnnnnnnnnnnnnnnnnnnnnnnnnnnnnnnnnnnnnnnnnnnnnnnnnnnnnnnnnnnnnnnnnnnnnnnnnnnnnnnnnnnnnnnnnnnnnnnnnnnnnnnnnnnnnnnnnnnnnnnnnnnnnnnnnnnnnnnnnnnnnnnnnnnnnnnnnnnnnnnnnnnnnnnnnnnnnnnnnnnnnnnnnnnnnnnnnnnnnnnnnnnnnnnnnnnnnnnnnnnnnnnnnnnnnnnnnnnnnnnnnnnnnnnnnnnnnnnnnnnnnnnnnnnnnnnnnnnnnnnnnnnnnnnnnnnnnnnnnnnnnnnnnnnnnnnnnnnnnnnnnnnnnnnnnnnnnnnnnnnnnnnnnnnnnnnnnnnnnnnnnnnnnnnnnnnnnnnnnnnnnnnnnnnnnnnnnnnnnnnnnnnnnnnnnnnnnnnnnnnnnnnnnnnnnnnnnnnnnnnnnnnnnnnnnnnnnnnnnnnnnnnnnnnnnnnnnnnnnnnnnnnnnnnnnnnnnnnnnnnnnnnnnnnnnnnnnnnnnnnnnnnnnnnnnnnnnnnnnnnnnnnnnnnnnnnnnnnnnnnnnnnnnnnnnnnnnnnnnnnnnnnnnnnnnnnnnnnnnnnnnnnnnnnnnnnnnnnnnnnnnnnnnnnnnnnnnnnnnnnnnnnnnnnnnnnnnnnnnnnnnnnnnnnnnnnnnnnnnnnnnnnnnnnnnnnnnnnnnnnnnnnnnnnnnnnnnnnnnnnnnnnnnnnnnnnnnnnnnnnnnnnnnnnnnnnnnnnnnnnnnnnnnnnnnnnnnnnnnnnnnnnnnnnnnnnnnnnnnnnnnnnnnnnnnnnnnnnnnnnnnnnnnnnnnnnnnnnnnnnnnnnnnnnnnnnnnnnnnnnnnnnnnnnnnnnnnnnnnnnnnnnnnnnnnnnnnnnnnnnnnnnnnnnnnnnnnnnnnnnnnnnnnnnnnnnnnnnnnnnnnnnnnnnnnnnnnnnnnnnnnnnnnnnnnnnnnnnnnnnnnnnnnnnnnnnnnnnnnnnnnnnnnnnnnnnnnnnnnnnnnnnnnnnnnnnnnnnnnnnnnnnnnnnnnnnnnnnnnnnnnnnnnnnnnnnnnnnnnnnnnnnnnnnnnnnnnnnnnnnnnnnnnnnnnnnnnnnnnnnnnnnnnnnnnnnnnnnnnnnnnnnnnnnnnnnnnnnnnnnnnnnnnnnnnnnnnnnnnnnnnnnnnnnnnnnnnnnnnnnnnnnnnnnnnnnnnnnnnnnnnnnnnnnnnnnnnnnnnnnnnnnnnnnnnnnnnnnnnnnnnnnnnnnnnnnnnnnnnnnnnnnnnnnnnnnnnnnnnnnnnnnnnnnnnnnnnnnnnnnnnnnnnnnnnnnnnnnnnnnnnnnnnnnnnnnnnnnnnnnnnnnnnnnnnnnnnnnnnnnnnnnnnnnnnnnnnnnnnnnnnnnnnnnnnnnnnnnnnnnnnnnnnnnnnnnnnnnnnnnnnnnnnnnnnnnnnnnnnnnnnnnnnnnnnnnnnnnnnnnnnnnnnnnnnnnnnnnnnnnnnnnnnnnnnnnnnnnnnnnnnnnnnnnnnnnnnnnnnnnnnnnnnnnnnnnnnnnnnnnnnnnnnnnnnnnnnnnnnnnnnnnnnnnnnnnnnnnnnnnnnnnnnnnnnnnnnnnnnnnnnnnnnnnnnnnnnnnnnnnnnnnnnnnnnnnnnnnnnnnnnnnnnnnnnnnnnnnnnnnnnnnnnnnnnnnnnnnnnnnnnnnnnnnnnnnnnnnnnnnnnnnnnnnnnnnnnnnnnnnnnnnnnnnnnnnnnnnnnnnnnnnnnnnnnnnnnnnnnnnnnnnnnnnnnnnnnnnnnnnnnnnnnnnnnnnnnnnnnnnnnnnnnnnnnnnnnnnnnnnnnnnnnnnnnnnnnnnnnnnnnnnnnnnnnnnnnnnnnnnnnnnnnnnnnnnnnnnnnnnnnnnnnnnnnnnnnnnnnnnnnnnnnnnnnnnnnnnnnnnnnnnnnnnnnnnnnnnnnnnnnnnnnnnnnnnnnnnnnnnnnnnnnnnnnnnnnnnnnnnnnnnnnnnnnnnnnnnnnnnnnnnnnnnnnnnnnnnnnnnnnnnnnnnnnnnnnnnnnnnnnnnnnnnnnnnnnnnnnnnnnnnnnnnnnnnnnnnnnnnnnnnnnnnnnnnnnnnnnnnnnnnnnnnnnnnnnnnnnnnnnnnnnnnnnnnnnnnnnnnnnnnnnnnnnnnnnnnnnnnnnnnnnnnnnnnnnnnnnnnnnnnnnnnnnnnnnnnnnnnnnnnnnnnnnnnnnnnnnnnnnnnnnnnnnnnnnnnnnnnnnnnnnnnnnnnnnnnnnnnnnnnnnnnnnnnnnnnnnnnnnnnnnnnnnnnnnnnnnnnnnnnnnnnnnnnnnnnnnnnnnnnnnnnnnnnnnnnnnnnnnnnnnnnnnnnnnnnnnnnnnnnnnnnnnnnnnnnnnnnnnnnnnnnnnnnnnnnnnnnnnnnnnnnnnnnnnnnnnnnnnnnnnnnnnnnnnnnnnnnnnnnnnnnnnnnnnnnnnnnnnnnnnnnnnnnnnnnnnnnnnnnnnnnnnnnnnnnnnnnnnnnnnnnnnnnnnnnnnnnnnnnnnnnnnnnnnnnnnnnnnnnnnnnnnnnnnnnnnnnnnnnnnnnnnnnnnnnnnnnnnnnnnnnnnnnnnnnnnnnnnnnnnnnnnnnnnnnnnnnnnnnnnnnnnnnnnnnnnnnnnnnnnnnnnnnnnnnnnnnnnnnnnnnnnnnnnnnnnnnnnnnnnnnnnnnnnnnnnnnnnnnnnnnnnnnnnnnnnnnnnnnnnnnnnnnnnnnnnnnnnnnnnnnnnnnnnnnnnnnnnnnnnnnnnnnnnnnnnnnnnnnnnnnnnnnnnnnnnnnnnnnnnnnnnnnnnnnnnnnnnnnnnnnnnnnnnnnnnnnnnnnnnnnnnnnnnnnnnnnnnnnnnnnnnnnnnnnnnnnnnnnnnnnnnnnnnnnnnnnnnnnnnnnnnnnnnnnnnnnnnnnnnnnnnnnnnnnnnnnnnnnnnnnnnnnnnnnnnnnnnnnnnnnnnnnnnnnnnnnnnnnnnnnnnnnnnnnnnnnnnnnnnnnnnnnnnnnnnnnnnnnnnnnnnnnnnnnnnnnnnnnnnnnnnnnnnnnnnnnnnnnnnnnnnnnnnnnnnnnnnnnnnnnnnnnnnnnnnnnnnnnnnnnnnnnnnnnnnnnnnnnnnnnnnnnnnnnnnnnnnnnnnnnnnnnnnnnnnnnnnnnnnnnnnnnnnnnnnnnnnnnnnnnnnnnnnnnnnnnnnnnnnnnnnnnnnnnnnnnnnnnnnnnnnnnnnnnnnnnnnnnnnnnnnnnnnnnnnnnnnnnnnnnnnnnnnnnnnnnnnnnnnnnnnnnnnnnnnnnnnnnnnnnnnnnnnnnnnnnnnnnnnnnnnnnnnnnnnnnnnnnnnnnnnnnnnnnnnnnnnnnnnnnnnnnnnnnnnnnnnnnnnnnnnnnnnnnnnnnnnnnnnnnnnnnnnnnnnnnnnnnnnnnnnnnnnnnnnnnnnnnnnnnnnnnnnnnnnnnnnnnnnnnnnnnnnnnnnnnnnnnnnnnnnnnnnnnnnnnnnnnnnnnnnnnnnnnnnnnnnnnnnnnnnnnnnnnnnnnnnnnnnnnnnnnnnnnnnnnnnnnnnnnnnnnnnnnnnnnnnnnnnnnnnnnnnnnnnnnnnnnnnnnnnnnnnnnnnnnnnnnnnnnnnnnnnnnnnnnnnnnnnnnnnnnnnnnnnnnnnnnnnnnnnnnnnnnnnnnnnnnnnnnnnnnnnnnnnnnnnnnnnnnnnnnnnnnnnnnnnnnnnnnnnnnnnnnnnnnnnnnnnnnnnnnnnnnnnnnnnnnnnnnnnnnnnnnnnnnnnnnnnnnnnnnnnnnnnnnnnnnnnnnnnnnnnnnnnnnnnnnnnnnnnnnnnnnnnnnnnnnnnnnnnnnnnnnnnnnnnnnnnnnnnnnnnnnnnnnnnnnnnnnnnnnnnnnnnnnnnnnnnnnnnnnnnnnnnnnnnnnnnnnnnnnnnnnnnnnnnnnnnnnnnnnnnnnnnnnnnnnnnnnnnnnnnnnnnnnnnnnnnnnnnnnnnnnnnnnnnnnnnnnnnnnnnnnnnnnnnnnnnnnnnnnnnnnnnnnnnnnnnnnnnnnnnnnnnnnnnnnnnnnnnnnnnnnnnnnnnnnnnnnnnnnnnnnnnnnnnnnnnnnnnnnnnnnnnnnnnnnnnnnnnnnnnnnnnnnnnnnnnnnnnnnnnnnnnnnnnnnnnnnnnnnnnnnnnnnnnnnnnnnnnnnnnnnnnnnnnnnnnnnnnnnnnnnnnnnnnnnnnnnnnnnnnnnnnnnnnnnnnnnnnnnnnnnnnnnnnnnnnnnnnnnnnnnnnnnnnnnnnnnnnnnnnnnnnnnnnnnnnnnnnnnnnnnnnnnnnnnnnnnnnnnnnnnnnnnnnnnnnnnnnnnnnnnnnnnnnnnnnnnnnnnnnnnnnnnnnnnnnnnnnnnnnnnnnnnnnnnnnnnnnnnnnnnnnnnnnnnnnnnnnnnnnnnnnnnnnnnnnnnnnnnnnnnnnnnnnnnnnnnnnnnnnnnnnnnnnnnnnnnnnnnnnnnnnnnnnnnnnnnnnnnnnnnnnnnnnnnnnnnnnnnnnnnnnnnnnnnnnnnnnnnnnnnnnnnnnnnnnnnnnnnnnnnnnnnnnnnnnnnnnnnnnnnnnnnnnnnnnnnnnnnnnnnnnnnnnnnnnnnnnnnnnnnnnnnnnnnnnnnnnnnnnnnnnnnnnnnnnnnnnnnnnnnnnnnnnnnnnnnnnnnnnnnnnnnnnnnnnnnnnnnnnnnnnnnnnnnnnnnnnnnnnnnnnnnnnnnnnnnnnnnnnnnnnnnnnnnnnnnnnnnnnnnnnnnnnnnnnnnnnnnnnnnnnnnnnnnnnnnnnnnnnnnnnnnnnnnnnnnnnnnnnnnnnnnnnnnnnnnnnnnnnnnnnnnnnnnnnnnnnnnnnnnnnnnnnnnnnnnnnnnnnnnnnnnnnnnnnnnnnnnnnnnnnnnnnnnnnnnnnnnnnnnnnnnnnnnnnnnnnnnnnnnnnnnnnnnnnnnnnnnnnnnnnnnnnnnnnnnnnnnnnnnnnnnnnnnnnnnnnnnnnnnnnnnnnnnnnnnnnnnnnnnnnnnnnnnnnnnnnnnnnnnnnnnnnnnnnnnnnnnnnnnnnnnnnnnnnnnnnnnnnnnnnnnnnnnnnnnnnnnnnnnnnnnnnnnnnnnnnnnnnnnnnnnnnnnnnnnnnnnnnnnnnnnnnnnnnnnnnnnnnnnnnnnnnnnnnnnnnnnnnnnnnnnnnnnnnnnnnnnnnnnnnnnnnnnnnnnnnnnnnnnnnnnnnnnnnnnnnnnnnnnnnnnnnnnnnnnnnnnnnnnnnnnnnnnnnnnnnnnnnnnnnnnnnnnnnnnnnnnnnnnnnnnnnnnnnnnnnnnnnnnnnnnnnnnnnnnnnnnnnnnnnnnnnnnnnnnnnnnnnnnnnnnnnnnnnnnnnnnnnnnnnnnnnnnnnnnnnnnnnnnnnnnnnnnnnnnnnnnnnnnnnnnnnnnnnnnnnnnnnnnnnnnnnnnnnnnnnnnnnnnnnnnnnnnnnnnnnnnnnnnnnnnnnnnnnnnnnnnnnnnnnnnnnnnnnnnnnnnnnnnnnnnnnnnnnnnnnnnnnnnnnnnnnnnnnnnnnnnnnnnnnnnnnnnnnnnnnnnnnnnnnnnnnnnnnnnnnnnnnnnnnnnnnnnnnnnnnnnnnnnnnnnnnnnnnnnnnnnnnnnnnnnnnnnnnnnnnnnnnnnnnnnnnnnnnnnnnnnnnnnnnnnnnnnnnnnnnnnnnnnnnnnnnnnnnnnnnnnnnnnnnnnnnnnnnnnnnnnnnnnnnnnnnnnnnnnnnnnnnnnnnnnnnnnnnnnnnnnnnnnnnnnnnnnnnnnnnnnnnnnnnnnnnnnnnnnnnnnnnnnnnnnnnnnnnnnnnnnnnnnnnnnnnnnnnnnnnnnnnnnnnnnnnnnnnnnnnnnnnnnnnnnnnnnnnnnnnnnnnnnnnnnnnnnnnnnnnnnnnnnnnnnnnnnnnnnnnnnnnnnnnnnnnnnnnnnnnnnnnnnnnnnnnnnnnnnnnnnnnnnnnnnnnnnnnnnnnnnnnnnnnnnnnnnnnnnnnnnnnnnnnnnnnnnnnnnnnnnnnnnnnnnnnnnnnnnnnnnnnnnnnnnnnnnnnnnnnnnnnnnnnnnnnnnnnnnnnnnnnnnnnnnnnnnnnnnnnnnnnnnnnnnnnnnnnnnnnnnnnnnnnnnnnnnnnnnnnnnnnnnnnnnnnnnnnnnnnnnnnnnnnnnnnnnnnnnnnnnnnnnnnnnnnnnnnnnnnnnnnnnnnnnnnnnnnnnnnnnnnnnnnnnnnnnnnnnnnnnnnnnnnnnnnnnnnnnnnnnnnnnnnnnnnnnnnnnnnnnnnnnnnnnnnnnnnnnnnnnnnnnnnnnnnnnnnnnnnnnnnnnnnnnnnnnnnnnnnnnnnnnnnnnnnnnnnnnnnnnnnnnnnnnnnnnnnnnnnnnnnnnnnnnnnnnnnnnnnnnnnnnnnnnnnnnnnnnnnnnnnnnnnnnnnnnnnnnnnnnnnnnnnnnnnnnnnnnnnnnnnnnnnnnnnnnnnnnnnnnnnnnnnnnnnnnnnnnnnnnnnnnnnnnnnnnnnnnnnnnnnnnnnnnnnnnnnnnnnnnnnnnnnnnnnnnnnnnnnnnnnnnnnnnnnnnnnnnnnnnnnnnnnnnnnnnnnnnnnnnnnnnnnnnnnnnnnnnnnnnnnnnnnnnnnnnnnnnnnnnnnnnnnnnnnnnnnnnnnnnnnnnnnnnnnnnnnnnnnnnnnnnnnnnnnnnnnnnnnnnnnnnnnnnnnnnnnnnnnnnnnnnnnnnnnnnnnnnnnnnnnnnnnnnnnnnnnnnnnnnnnnnnnnnnnnnnnnnnnnnnnnnnnnnnnnnnnnnnnnnnnnnnnnnnnnnnnnnnnnnnnnnnnnnnnnnnnnnnnnnnnnnnnnnnnnnnnnnnnnnnnnnnnnnnnnnnnnnnnnnnnnnnnnnnnnnnnnnnnnnnnnnnnnnnnnnnnnnnnnnnnnnnnnnnnnnnnnnnnnnnnnnnnnnnnnnnnnnnnnnnnnnnnnnnnnnnnnnnnnnnnnnnnnnnnnnnnnnnnnnnnnnnnnnnnnnnnnnnnnnnnnnnnnnnnnnnnnnnnnnnnnnnnnnnnnnnnnnnnnnnnnnnnnnnnnnnnnnnnnnnnnnnnnnnnnnnnnnnnnnnnnnnnnnnnnnnnnnnnnnnnnnnnnnnnnnnnnnnnnnnnnnnnnnnnnnnnnnnnnnnnnnnnnnnnnnnnnnnnnnnnnnnnnnnnnnnnnnnnnnnnnnnnnnnnnnnnnnnnnnnnnnnnnnnnnnnnnnnnnnnnnnnnnnnnnnnnnnnnnnnnnnnnnnnnnnnnnnnnnnnnnnnnnnnnnnnnnnnnnnnnnnnnnnnnnnnnnnnnnnnnnnnnnnnnnnnnnnnnnnnnnnnnnnnnnnnnnnnnnnnnnnnnnnnnnnnnnnnnnnnnnnnnnnnnnnnnnnnnnnnnnnnnnnnnnnnnnnnnnnnnnnnnnnnnnnnnnnnnnnnnnnnnnnnnnnnnnnnnnnnnnnnnnnnnnnnnnnnnnnnnnnnnnnnnnnnnnnnnnnnnnnnnnnnnnnnnnnnnnnnnnnnnnnnnnnnnnnnnnnnnnnnnnnnnnnnnnnnnnnnnnnnnnnnnnnnnnnnnnnnnnnnnnnnnnnnnnnnnnnnnnnnnnnnnnnnnnnnnnnnnnnnnnnnnnnnnnnnnnnnnnnnnnnnnnnnnnnnnnnnnnnnnnnnnnnnnnnnnnnnnnnnnnnnnnnnnnnnnnnnnnnnnnnnnnnnnnnnnnnnnnnnnnnnnnnnnnnnnnnnnnnnnnnnnnnnnnnnnnnnnnnnnnnnnnnnnnnnnnnnnnnnnnnnnnnnnnnnnnnnnnnnnnnnnnnnnnnnnnnnnnnnnnnnnnnnnnnnnnnnnnnnnnnnnnnnnnnnnnnnnnnnnnnnnnnnnnnnnnnnnnnnnnnnnnnnnnnnnnnnnnnnnnnnnnnnnnnnnnnnnnnnnnnnnnnnnnnnnnnnnnnnnnnnnnnnnnnnnnnnnnnnnnnnnnnnnnnnnnnnnnnnnnnnnnnnnnnnnnnnnnnnnnnnnnnnnnnnnnnnnnnnnnnnnnnnnnnnnnnnnnnnnnnnnnnnnnnnnnnnnnnnnnnnnnnnnnnnnnnnnnnnnnnnnnnnnnnnnnnnnnnnnnnnnnnnnnnnnnnnnnnnnnnnnnnnnnnnnnnnnnnnnnnnnnnnnnnnnnnnnnnnnnnnnnnnnnnnnnnnnnnnnnnnnnnnnnnnnnnnnnnnnnnnnnnnnnnnnnnnnnnnnnnnnnnnnnnnnnnnnnnnnnnnnnnnnnnnnnnnnnnnnnnnnnnnnnnnnnnnnnnnnnnnnnnnnnnnnnnnnnnnnnnnnnnnnnnnnnnnnnnnnnnnnnnnnnnnnnnnnnnnnnnnnnnnnnnnnnnnnnnnnnnnnnnnnnnnnnnnnnnnnnnnnnnnnnnnnnnnnnnnnnnnnnnnnnnnnnnnnnnnnnnnnnnnnnnnnnnnnnnnnnnnnnnnnnnnnnnnnnnnnnnnnnnnnnnnnnnnnnnnnnnnnnnnnnnnnnnnnnnnnnnnnnnnnnnnnnnnnnnnnnnnnnnnnnnnnnnnnnnnnnnnnnnnnnnnnnnnnnnnnnnnnnnnnnnnnnnnnnnnnnnnnnnnnnnnnnnnnnnnnnnnnnnnnnnnnnnnnnnnnnnnnnnnnnnnnnnnnnnnnnnnnnnnnnnnnnnnnnnnnnnnnnnnnnnnnnnnnnnnnnnnnnnnnnnnnnnnnnnnnnnnnnnnnnnnnnnnnnnnnnnnnnnnnnnnnnnnnnnnnnnnnnnnnnnnnnnnnnnnnnnnnnnnnnnnnnnnnnnnnnnnnnnnnnnnnnnnnnnnnnnnnnnnnnnnnnnnnnnnnnnnnnnnnnnnnnnnnnnnnnnnnnnnnnnnnnnnnnnnnnnnnnnnnnnnnnnnnnnnnnnnnnnnnnnnnnnnnnnnnnnnnnnnnnnnnnnnnnnnnnnnnnnnnnnnnnnnnnnnnnnnnnnnnnnnnnnnnnnnnnnnnnnnnnnnnnnnnnnnnnnnnnnnnnnnnnnnnnnnnnnnnnnnnnnnnnnnnnnnnnnnnnnnnnnnnnnnnnnnnnnnnnnnnnnnnnnnnnnnnnnnnnnnnnnnnnnnnnnnnnnnnnnnnnnnnnnnnnnnnnnnnnnnnnnnnnnnnnnnnnnnnnnnnnnnnnnnnnnnnnnnnnnnnnnnnnnnnnnnnnnnnnnnnnnnnnnnnnnnnnnnnnnnnnnnnnnnnnnnnnnnnnnnnnnnnnnnnnnnnnnnnnnnnnnnnnnnnnnnnnnnnnnnnnnnnnnnnnnnnnnnnnnnnnnnnnnnnnnnnnnnnnnnnnnnnnnnnnnnnnnnnnnnnnnnnnnnnnnnnnnnnnnnnnnnnnnnnnnnnnnnnnnnnnnnnnnnnnnnnnnnnnnnnnnnnnnnnnnnnnnnnnnnnnnnnnnnnnnnnnnnnnnnnnnnnnnnnnnnnnnnnnnnnnnnnnnnnnnnnnnnnnnnnnnnnnnnnnnnnnnnnnnnnnnnnnnnnnnnnnnnnnnnnnnnnnnnnnnnnnnnnnnnnnnnnnnnnnnnnnnnnnnnnnnnnnnnnnnnnnnnnnnnnnnnnnnnnnnnnnnnnnnnnnnnnnnnnnnnnnnnnnnnnnnnnnnnnnnnnnnnnnnnnnnnnnnnnnnnnnnnnnnnnnnnnnnnnnnnnnnnnnnnnnnnnnnnnnnnnnnnnnnnnnnnnnnnnnnnnnnnnnnnnnnnnnnnnnnnnnnnnnnnnnnnnnnnnnnnnnnnnnnnnnnnnnnnnnnnnnnnnnnnnnnnnnnnnnnnnnnnnnnnnnnnnnnnnnnnnnnnnnnnnnnnnnnnnnnnnnnnnnnnnnnnnnnnnnnnnnnnnnnnnnnnnnnnnnnnnnnnnnnnnnnnnnnnnnnnnnnnnnnnnnnnnnnnnnnnnnnnnnnnnnnnnnnnnnnnnnnnnnnnnnnnnnnnnnnnnnnnnnnnnnnnnnnnnnnnnnnnnnnnnnnnnnnnnnnnnnnnnnnnnnnnnnnnnnnnnnnnnnnnnnnnnnnnnnnnnnnnnnnnnnnnnnnnnnnnnnnnnnnnnnnnnnnnnnnnnnnnnnnnnnnnnnnnnnnnnnnnnnnnnnnnnnnnnnnnnnnnnnnnnnnnnnnnnnnnnnnnnnnnnnnnnnnnnnnnnnnnnnnnnnnnnnnnnnnnnnnnnnnnnnnnnnnnnnnnnnnnnnnnnnnnnnnnnnnnnnnnnnnnnnnnnnnnnnnnnnnnnnnnnnnnnnnnnnnnnnnnnnnnnnnnnnnnnnnnnnnnnnnnnnnnnnnnnnnnnnnnnnnnnnnnnnnnnnnnnnnnnnnnnnnnnnnnnnnnnnnnnnnnnnnnnnnnnnnnnnnnnnnnnnnnnnnnnnnnnnnnnnnnnnnnnnnnnnnnnnnnnnnnnnnnnnnnnnnnnnnnnnnnnnnnnnnnnnnnnnnnnnnnnnnnnnnnnnnnnnnnnnnnnnnnnnnnnnnnnnnnnnnnnnnnnnnnnnnnnnnnnnnnnnnnnnnnnnnnnnnnnnnnnnnnnnnnnnnnnnnnnnnnnnnnnnnnnnnnnnnnnnnnnnnnnnnnnnnnnnnnnnnnnnnnnnnnnnnnnnnnnnnnnnnnnnnnnnnnnnnnnnnnnnnnnnnnnnnnnnnnnnnnnnnnnnnnnnnnnnnnnnnnnnnnnnnnnnnnnnnnnnnnnnnnnnnnnnnnnnnnnnnnnnnnnnnnnnnnnnnnnnnnnnnnnnnnnnnnnnnnnnnnnnnnnnnnnnnnnnnnnnnnnnnnnnnnnnnnnnnnnnnnnnnnnnnnnnnnnnnnnnnnnnnnnnnnnnnnnnnnnnnnnnnnnnnnnnnnnnnnnnnnnnnnnnnnnnnnnnnnnnnnnnnnnnnnnnnnnnnnnnnnnnnnnnnnnnnnnnnnnnnnnnnnnnnnnnnnnnnnnnnnnnnnnnnnnnnnnnnnnnnnnnnnnnnnnnnnnnnnnnnnnnnnnnnnnnnnnnnnnnnnnnnnnnnnnnnnnnnnnnnnnnnnnnnnnnnnnnnnnnnnnnnnnnnnnnnnnnnnnnnnnnnnnnnnnnnnnnnnnnnnnnnnnnnnnnnnnnnnnnnnnnnnnnnnnnnnnnnnnnnnnnnnnnnnnnnnnnnnnnnnnnnnnnnnnnnnnnnnnnnnnnnnnnnnnnnnnnnnnnnnnnnnnnnnnnnnnnnnnnnnnnnnnnnnnnnnnnnnnnnnnnnnnnnnnnnnnnnnnnnnnnnnnnnnnnnnnnnnnnnnnnnnnnnnnnnnnnnnnnnnnnnnnnnnnnnnnnnnnnnnnnnnnnnnnnnnnnnnnnnnnnnnnnnnnnnnnnnnnnnnnnnnnnnnnnnnnnnnnnnnnnnnnnnnnnnnnnnnnnnnnnnnnnnnnnnnnnnnnnnnnnnnnnnnnnnnnnnnnnnnnnnnnnnnnnnnnnnnnnnnnnnnnnnnnnnnnnnnnnnnnnnnnnnnnnnnnnnnnnnnnnnnnnnnnnnnnnnnnnnnnnnnnnnnnnnnnnnnnnnnnnnnnnnnnnnnnnnnnnnnnnnnnnnnnnnnnnnnnnnnnnnnnnnnnnnnnnnnnnnnnnnnnnnnnnnnnnnnnnnnnnnnnnnnnnnnnnnnnnnnnnnnnnnnnnnnnnnnnnnnnnnnnnnnnnnnnnnnnnnnnnnnnnnnnnnnnnnnnnnnnnnnnnnnnnnnnnnnnnnnnnnnnnnnnnnnnnnnnnnnnnnnnnnnnnnnnnnnnnnnnnnnnnnnnnnnnnnnnnnnnnnnnnnnnnnnnnnnnnnnnnnnnnnnnnnnnnnnnnnnnnnnnnnnnnnnnnnnnnnnnnnnnnnnnnnnnnnnnnnnnnnnnnnnnnnnnnnnnnnnnnnnnnnnnnnnnnnnnnnnnnnnnnnnnnnnnnnnnnnnnnnnnnnnnnnnnnnnnnnnnnnnnnnnnnnnnnnnnnnnnnnnnnnnnnnnnnnnnnnnnnnnnnnnnnnnnnnnnnnnnnnnnnnnnnnnnnnnnnnnnnnnnnnnnnnnnnnnnnnnnnnnnnnnnnnnnnnnnnnnnnnnnnnnnnnnnnnnnnnnnnnnnnnnnnnnnnnnnnnnnnnnnnnnnnnnnnnnnnnnnnnnnnnnnnnnnnnnnnnnnnnnnnnnnnnnnnnnnnnnnnnnnnnnnnnnnnnnnnnnnnnnnnnnnnnnnnnnnnnnnnnnnnnnnnnnnnnnnnnnnnnnnnnnnnnnnnnnnnnnnnnnnnnnnnnnnnnnnnnnnnnnnnnnnnnnnnnnnnnnnnnnnnnnnnnnnnnnnnnnnnnnnnnnnnnnnnnnnnnnnnnnnnnnnnnnnnnnnnnnnnnnnnnnnnnnnnnnnnnnnnnnnnnnnnnnnnnnnnnnnnnnnnnnnnnnnnnnnnnnnnnnnnnnnnnnnnnnnnnnnnnnnnnnnnnnnnnnnnnnnnnnnnnnnnnnnnnnnnnnnnnnnnnnnnnnnnnnnnnnnnnnnnnnnnnnnnnnnnnnnnnnnnnnnnnnnnnnnnnnnnnnnnnnnnnnnnnnnnnnnnnnnnnnnnnnnnnnnnnnnnnnnnnnnnnnnnnnnnnnnnnnnnnnnnnnnnnnnnnnnnnnnnnnnnnnnnnnnnnnnnnnnnnnnnnnnnnnnnnnnnnnnnnnnnnnnnnnnnnnnnnnnnnnnnnnnnnnnnnnnnnnnnnnnnnnnnnnnnnnnnnnnnnnnnnnnnnnnnnnnnnnnnnnnnnnnnnnnnnnnnnnnnnnnnnnnnnnnnnnnnnnnnnnnnnnnnnnnnnnnnnnnnnnnnnnnnnnnnnnnnnnnnnnnnnnnnnnnnnnnnnnnnnnnnnnnnnnnnnnnnnnnnnnnnnnnnnnnnnnnnnnnnnnnnnnnnnnnnnnnnnnnnnnnnnnnnnnnnnnnnnnnnnnnnnnnnnnnnnnnnnnnnnnnnnnnnnnnnnnnnnnnnnnnnnnnnnnnnnnnnnnnnnnnnnnnnnnnnnnnnnnnnnnnnnnnnnnnnnnnnnnnnnnnnnnnnnnnnnnnnnnnnnnnnnnnnnnnnnnnnnnnnnnnnnnnnnnnnnnnnnnnnnnnnnnnnnnnnnnnnnnnnnnnnnnnnnnnnnnnnnnnnnnnnnnnnnnnnnnnnnnnnnnnnnnnnnnnnnnnnnnnnnnnnnnnnnnnnnnnnnnnnnnnnnnnnnnnnnnnnnnnnnnnnnnnnnnnnnnnnnnnnnnnnnnnnnnnnnnnnnnnnnnnnnnnnnnnnnnnnnnnnnnnnnnnnnnnnnnnnnnnnnnnnnnnnnnnnnnnnnnnnnnnnnnnnnnnnnnnnnnnnnnnnnnnnnnnnnnnnnnnnnnnnnnnnnnnnnnnnnnnnnnnnnnnnnnnnnnnnnnnnnnnnnnnnnnnnnnnnnnnnnnnnnnnnnnnnnnnnnnnnnnnnnnnnnnnnnnnnnnnnnnnnnnnnnnnnnnnnnnnnnnnnnnnnnnnnnnnnnnnnnnnnnnnnnnnnnnnnnnnnnnnnnnnnnnnnnnnnnnnnnnnnnnnnnnnnnnnnnnnnnnnnnnnnnnnnnnnnnnnnnnnnnnnnnnnnnnnnnnnnnnnnnnnnnnnnnnnnnnnnnnnnnnnnnnnnnnnnnnnnnnnnnnnnnnnnnnnnnnnnnnnnnnnnnnnnnnnnnnnnnnnnnnnnnnnnnnnnnnnnnnnnnnnnnnnnnnnnnnnnnnnnnnnnnnnnnnnnnnnnnnnnnnnnnnnnnnnnnnnnnnnnnnnnnnnnnnnnnnnnnnnnnnnnnnnnnnnnnnnnnnnnnnnnnnnnnnnnnnnnnnnnnnnnnnnnnnnnnnnnnnnnnnnnnnnnnnnnnnnnnnnnnnnnnnnnnnnnnnnnnnnnnnnnnnnnnnnnnnnnnnnnnnnnnnnnnnnnnnnnnnnnnnnnnnnnnnnnnnnnnnnnnnnnnnnnnnnnnnnnnnnnnnnnnnnnnnnnnnnnnnnnnnnnnnnnnnnnnnnnnnnnnnnnnnnnnnnnnnnnnnnnnnnnnnnnnnnnnnnnnnnnnnnnnnnnnnnnnnnnnnnnnnnnnnnnnnnnnnnnnnnnnnnnnnnnnnnnnnnnnnnnnnnnnnnnnnnnnnnnnnnnnnnnnnnnnnnnnnnnnnnnnnnnnnnnnnnnnnnnnnnnnnnnnnnnnnnnnnnnnnnnnnnnnnnnnnnnnnnnnnnnnnnnnnnnnnnnnnnnnnnnnnnnnnnnnnnnnnnnnnnnnnnnnnnnnnnnnnnnnnnnnnnnnnnnnnnnnnnnnnnnnnnnnnnnnnnnnnnnnnnnnnnnnnnnnnnnnnnnnnnnnnnnnnnnnnnnnnnnnnnnnnnnnnnnnnnnnnnnnnnnnnnnnnnnnnnnnnnnnnnnnnnnnnnnnnnnnnnnnnnnnnnnnnnnnnnnnnnnnnnnnnnnnnnnnnnnnnnnnnnnnnnnnnnnnnnnnnnnnnnnnnnnnnnnnnnnnnnnnnnnnnnnnnnnnnnnnnnnnnnnnnnnnnnnnnnnnnnnnnnnnnnnnnnnnnnnnnnnnnnnnnnnnnnnnnnnnnnnnnnnnnnnnnnnnnnnnnnnnnnnnnnnnnnnnnnnnnnnnnnnnnnnnnnnnnnnnnnnnnnnnnnnnnnnnnnnnnnnnnnnnnnnnnnnnnnnnnnnnnnnnnnnnnnnnnnnnnnnnnnnnnnnnnnnnnnnnnnnnnnnnnnnnnnnnnnnnnnnnnnnnnnnnnnnnnnnnnnnnnnnnnnnnnnnnnnnnnnnnnnnnnnnnnnnnnnnnnnnnnnnnnnnnnnnnnnnnnnnnnnnnnnnnnnnnnnnnnnnnnnnnnnnnnnnnnnnnnnnnnnnnnnnnnnnnnnnnnnnnnnnnnnnnnnnnnnnnnnnnnnnnnnnnnnnnnnnnnnnnnnnnnnnnnnnnnnnnnnnnnnnnnnnnnnnnnnnnnnnnnnnnnnnnnnnnnnnnnnnnnnnnnnnnnnnnnnnnnnnnnnnnnnnnnnnnnnnnnnnnnnnnnnnnnnnnnnnnnnnnnnnnnnnnnnnnnnnnnnnnnnnnnnnnnnnnnnnnnnnnnnnnnnnnnnnnnnnnnnnnnnnnnnnnnnnnnnnnnnnnnnnnnnnnnnnnnnnnnnnnnnnnnnnnnnnnnnnnnnnnnnnnnnnnnnnnnnnnnnnnnnnnnnnnnnnnnnnnnnnnnnnnnnnnnnnnnnnnnnnnnnnnnnnnnnnnnnnnnnnnnnnnnnnnnnnnnnnnnnnnnnnnnnnnnnnnnnnnnnnnnnnnnnnnnnnnnnnnnnnnnnnnnnnnnnnnnnnnnnnnnnnnnnnnnnnnnnnnnnnnnnnnnnnnnnnnnnnnnnnnnnnnnnnnnnnnnnnnnnnnnnnnnnnnnnnnnnnnnnnnnnnnnnnnnnnnnnnnnnnnnnnnnnnnnnnnnnnnnnnnnnnnnnnnnnnnnnnnnnnnnnnnnnnnnnnnnnnnnnnnnnnnnnnnnnnnnnnnnnnnnnnnnnnnnnnnnnnnnnnnnnnnnnnnnnnnnnnnnnnnnnnnnnnnnnnnnnnnnnnnnnnnnnnnnnnnnnnnnnnnnnnnnnnnnnnnnnnnnnnnnnnnnnnnnnnnnnnnnnnnnnnnnnnnnnnnnnnnnnnnnnnnnnnnnnnnnnnnnnnnnnnnnnnnnnnnnnnnnnnnnnnnnnnnnnnnnnnnnnnnnnnnnnnnnnnnnnnnnnnnnnnnnnnnnnnnnnnnnnnnnnnnnnnnnnnnnnnnnnnnnnnnnnnnnnnnnnnnnnnnnnnnnnnnnnnnnnnnnnnnnnnnnnnnnnnnnnnnnnnnnnnnnnnnnnnnnnnnnnnnnnnnnnnnnnnnnnnnnnnnnnnnnnnnnnnnnnnnnnnnnnnnnnnnnnnnnnnnnnnnnnnnnnnnnnnnnnnnnnnnnnnnnnnnnnnnnnnnnnnnnnnnnnnnnnnnnnnnnnnnnnnnnnnnnnnnnnnnnnnnnnnnnnnnnnnnnnnnnnnnnnnnnnnnnnnnnnnnnnnnnnnnnnnnnnnnnnnnnnnnnnnnnnnnnnnnnnnnnnnnnnnnnnnnnnnnnnnnnnnnnnnnnnnnnnnnnnnnnnnnnnnnnnnnnnnnnnnnnnnnnnnnnnnnnnnnnnnnnnnnnnnnnnnnnnnnnnnnnnnnnnnnnnnnnnnnnnnnnnnnnnnnnnnnnnnnnnnnnnnnnnnnnnnnnnnnnnnnnnnnnnnnnnnnnnnnnnnnnnnnnnnnnnnnnnnnnnnnnnnnnnnnnnnnnnnnnnnnnnnnnnnnnnnnnnnnnnnnnnnnnnnnnnnnnnnnnnnnnnnnnnnnnnnnnnnnnnnnnnnnnnnnnnnnnnnnnnnnnnnnnnnnnnnnnnnnnnnnnnnnnnnnnnnnnnnnnnnnnnnnnnnnnnnnnnnnnnnnnnnnnnnnnnnnnnnnnnnnnnnnnnnnnnnnnnnnnnnnnnnnnnnnnnnnnnnnnnnnnnnnnnnnnnnnnnnnnnnnnnnnnnnnnnnnnnnnnnnnnnnnnnnnnnnnnnnnnnnnnnnnnnnnnnnnnnnnnnnnnnnnnnnnnnnnnnnnnnnnnnnnnnnnnnnnnnnnnnnnnnnnnnnnnnnnnnnnnnnnnnnnnnnnnnnnnnnnnnnnnnnnnnnnnnnnnnnnnnnnnnnnnnnnnnnnnnnnnnnnnnnnnnnnnnnnnnnnnnnnnnnnnnnnnnnnnnnnnnnnnnnnnnnnnnnnnnnnnnnnnnnnnnnnnnnnnnnnnnnnnnnnnnnnnnnnnnnnnnnnnnnnnnnnnnnnnnnnnnnnnnnnnnnnnnnnnnnnnnnnnnnnnnnnnnnnnnnnnnnnnnnnnnnnnnnnnnnnnnnnnnnnnnnnnnnnnnnnnnnnnnnnnnnnnnnnnnnnnnnnnnnnnnnnnnnnnnnnnnnnnnnnnnnnnnnnnnnnnnnnnnnnnnnnnnnnnnnnnnnnnnnnnnnnnnnnnnnnnnnnnnnnnnnnnnnnnnnnnnnnnnnnnnnnnnnnnnnnnnnnnnnnnnnnnnnnnnnnnnnnnnnnnnnnnnnnnnnnnnnnnnnnnnnnnnnnnnnnnnnnnnnnnnnnnnnnnnnnnnnnnnnnnnnnnnnnnnnnnnnnnnnnnnnnnnnnnnnnnnnnnnnnnnnnnnnnnnnnnnnnnnnnnnnnnnnnnnnnnnnnnnnnnnnnnnnnnnnnnnnnnnnnnnnnnnnnnnnnnnnnnnnnnnnnnnnnnnnnnnnnnnnnnnnnnnnnnnnnnnnnnnnnnnnnnnnnnnnnnnnnnnnnnnnnnnnnnnnnnnnnnnnnnnnnnnnnnnnnnnnnnnnnnnnnnnnnnnnnnnnnnnnnnnnnnnnnnnnnnnnnnnnnnnnnnnnnnnnnnnnnnnnnnnnnnnnnnnnnnnnnnnnnnnnnnnnnnnnnnnnnnnnnnnnnnnnnnnnnnnnnnnnnnnnnnnnnnnnnnnnnnnnnnnnnnnnnnnnnnnnnnnnnnnnnnnnnnnnnnnnnnnnnnnnnnnnnnnnnnnnnnnnnnnnnnnnnnnnnnnnnnnnnnnnnnnnnnnnnnnnnnnnnnnnnnnnnnnnnnnnnnnnnnnnnnnnnnnnnnnnnnnnnnnnnnnnnnnnnnnnnnnnnnnnnnnnnnnnnnnnnnnnnnnnnnnnnnnnnnnnnnnnnnnnnnnnnnnnnnnnnnnnnnnnnnnnnnnnnnnnnnnnnnnnnnnnnnnnnnnnnnnnnnnnnnnnnnnnnnnnnnnnnnnnnnnnnnnnnnnnnnnnnnnnnnnnnnnnnnnnnnnnnnnnnnnnnnnnnnnnnnnnnnnnnnnnnnnnnnnnnnnnnnnnnnnnnnnnnnnnnnnnnnnnnnnnnnnnnnnnnnnnnnnnnnnnnnnnnnnnnnnnnnnnnnnnnnnnnnnnnnnnnnnnnnnnnnnnnnnnnnnnnnnnnnnnnnnnnnnnnnnnnnnnnnnnnnnnnnnnnnnnnnnnnnnnnnnnnnnnnnnnnnnnnnnnnnnnnnnnnnnnnnnnnnnnnnnnnnnnnnnnnnnnnnnnnnnnnnnnnnnnnnnnnnnnnnnnnnnnnnnnnnnnnnnnnnnnnnnnnnnnnnnnnnnnnnnnnnnnnnnnnnnnnnnnnnnnnnnnnnnnnnnnnnnnnnnnnnnnnnnnnnnnnnnnnnnnnnnnnnnnnnnnnnnnnnnnnnnnnnnnnnnnnnnnnnnnnnnnnnnnnnnnnnnnnnnnnnnnnnnnnnnnnnnnnnnnnnnnnnnnnnnnnnnnnnnnnnnnnnnnnnnnnnnnnnnnnnnnnnnnnnnnnnnnnnnnnnnnnnnnnnnnnnnnnnnnnnnnnnnnnnnnnnnnnnnnnnnnnnnnnnnnnnnnnnnnnnnnnnnnnnnnnnnnnnnnnnnnnnnnnnnnnnnnnnnnnnnnnnnnnnnnnnnnnnnnnnnnnnnnnnnnnnnnnnnnnnnnnnnnnnnnnnnnnnnnnnnnnnnnnnnnnnnnnnnnnnnnnnnnnnnnnnnnnnnnnnnnnnnnnnnnnnnnnnnnnnnnnnnnnnnnnnnnnnnnnnnnnnnnnnnnnnnnnnnnnnnnnnnnnnnnnnnnnnnnnnnnnnnnnnnnnnnnnnnnnnnnnnnnnnnnnnnnnnnnnnnnnnnnnnnnnnnnnnnnnnnnnnnnnnnnnnnnnnnnnnnnnnnnnnnnnnnnnnnnnnnnnnnnnnnnnnnnnnnnnnnnnnnnnnnnnnnnnnnnnnnnnnnnnnnnnnnnnnnnnnnnnnnnnnnnnnnnnnnnnnnnnnnnnnnnnnnnnnnnnnnnnnnnnnnnnnnnnnnnnnnnnnnnnnnnnnnnnnnnnnnnnnnnnnnnnnnnnnnnnnnnnnnnnnnnnnnnnnnnnnnnnnnnnnnnnnnnnnnnnnnnnnnnnnnnnnnnnnnnnnnnnnnnnnnnnnnnnnnnnnnnnnnnnnnnnnnnnnnnnnnnnnnnnnnnnnnnnnnnnnnnnnnnnnnnnnnnnnnnnnnnnnnnnnnnnnnnnnnnnnnnnnnnnnnnnnnnnnnnnnnnnnnnnnnnnnnnnnnnnnnnnnnnnnnnnnnnnnnnnnnnnnnnnnnnnnnnnnnnnnnnnnnnnnnnnnnnnnnnnnnnnnnnnnnnnnnnnnnnnnnnnnnnnnnnnnnnnnnnnnnnnnnnnnnnnnnnnnnnnnnnnnnnnnnnnnnnnnnnnnnnnnnnnnnnnnnnnnnnnnnnnnnnnnnnnnnnnnnnnnnnnnnnnnnnnnnnnnnnnnnnnnnnnnnnnnnnnnnnnnnnnnnnnnnnnnnnnnnnnnnnnnnnnnnnnnnnnnnnnnnnnnnnnnnnnnnnnnnnnnnnnnnnnnnnnnnnnnnnnnnnnnnnnnnnnnnnnnnnnnnnnnnnnnnnnnnnnnnnnnnnnnnnnnnnnnnnnnnnnnnnnnnnnnnnnnnnnnnnnnnnnnnnnnnnnnnnnnnnnnnnnnnnnnnnnnnnnnnnnnnnnnnnnnnnnnnnnnnnnnnnnnnnnnnnnnnnnnnnnnnnnnnnnnnnnnnnnnnnnnnnnnnnnnnnnnnnnnnnnnnnnnnnnnnnnnnnnnnnnnnnnnnnnnnnnnnnnnnnnnnnnnnnnnnnnnnnnnnnnnnnnnnnnnnnnnnnnnnnnnnnnnnnnnnnnnnnnnnnnnnnnnnnnnnnnnnnnnnnnnnnnnnnnnnnnnnnnnnnnnnnnnnnnnnnnnnnnnnnnnnnnnnnnnnnnnnnnnnnnnnnnnnnnnnnnnnnnnnnnnnnnnnnnnnnnnnnnnnnnnnnnnnnnnnnnnnnnnnnnnnnnnnnnnnnnnnnnnnnnnnnnnnnnnnnnnnnnnnnnnnnnnnnnnnnnnnnnnnnnnnnnnnnnnnnnnnnnnnnnnnnnnnnnnnnnnnnnnnnnnnnnnnnnnnnnnnnnnnnnnnnnnnnnnnnnnnnnnnnnnnnnnnnnnnnnnnnnnnnnnnnnnnnnnnnnnnnnnnnnnnnnnnnnnnnnnnnnnnnnnnnnnnnnnnnnnnnnnnnnnnnnnnnnnnnnnnnnnnnnnnnnnnnnnnnnnnnnnnnnnnnnnnnnnnnnnnnnnnnnnnnnnnnnnnnnnnnnnnnnnnnnnnnnnnnnnnnnnnnnnnnnnnnnnnnnnnnnnnnnnnnnnnnnnnnnnnnnnnnnnnnnnnnnnnnnnnnnnnnnnnnnnnnnnnnnnnnnnnnnnnnnnnnnnnnnnnnnnnnnnnnnnnnnnnnnnnnnnnnnnnnnnnnnnnnnnnnnnnnnnnnnnnnnnnnnnnnnnnnnnnnnnnnnnnnnnnnnnnnnnnnnnnnnnnnnnnnnnnnnnnnnnnnnnnnnnnnnnnnnnnnnnnnnnnnnnnnnnnnnnnnnnnnnnnnnnnnnnnnnnnnnnnnnnnnnnnnnnnnnnnnnnnnnnnnnnnnnnnnnnnnnnnnnnnnnnnnnnnnnnnnnnnnnnnnnnnnnnnnnnnnnnnnnnnnnnnnnnnnnnnnnnnnnnnnnnnnnnnnnnnnnnnnnnnnnnnnnnnnnnnnnnnnnnnnnnnnnnnnnnnnnnnnnnnnnnnnnnnnnnnnnnnnnnnnnnnnnnnnnnnnnnnnnnnnnnnnnnnnnnnnnnnnnnnnnnnnnnnnnnnnnnnnnnnnnnnnnnnnnnnnnnnnnnnnnnnnnnnnnnnnnnnnnnnnnnnnnnnnnnnnnnnnnnnnnnnnnnnnnnnnnnnnnnnnnnnnnnnnnnnnnnnnnnnnnnnnnnnnnnnnnnnnnnnnnnnnnnnnnnnnnnnnnnnnnnnnnnnnnnnnnnnnnnnnnnnnnnnnnnnnnnnnnnnnnnnnnnnnnnnnnnnnnnnnnnnnnnnnnnnnnnnnnnnnnnnnnnnnnnnnnnnnnnnnnnnnnnnnnnnnnnnnnnnnnnnnnnnnnnnnnnnnnnnnnnnnnnnnnnnnnnnnnnnnnnnnnnnnnnnnnnnnnnnnnnnnnnnnnnnnnnnnnnnnnnnnnnnnnnnnnnnnnnnnnnnnnnnnnnnnnnnnnnnnnnnnnnnnnnnnnnnnnnnnnnnnnnnnnnnnnnnnnnnnnnnnnnnnnnnnnnnnnnnnnnnnnnnnnnnnnnnnnnnnnnnnnnnnnnnnnnnnnnnnnnnnnnnnnnnnnnnnnnnnnnnnnnnnnnnnnnnnnnnnnnnnnnnnnnnnnnnnnnnnnnnnnnnnnnnnnnnnnnnnnnnnnnnnnnnnnnnnnnnnnnnnnnnnnnnnnnnnnnnnnnnnnnnnnnnnnnnnnnnnnnnnnnnnnnnnnnnnnnnnnnnnnnnnnnnnnnnnnnnnnnnnnnnnnnnnnnnnnnnnnnnnnnnnnnnnnnnnnnnnnnnnnnnnnnnnnnnnnnnnnnnnnnnnnnnnnnnnnnnnnnnnnnnnnnnnnnnnnnnnnnnnnnnnnnnnnnnnnnnnnnnnnnnnnnnnnnnnnnnnnnnnnnnnnnnnnnnnnnnnnnnnnnnnnnnnnnnnnnnnnnnnnnnnnnnnnnnnnnnnnnnnnnnnnnnnnnnnnnnnnnnnnnnnnnnnnnnnnnnnnnnnnnnnnnnnnnnnnnnnnnnnnnnnnnnnnnnnnnnnnnnnnnnnnnnnnnnnnnnnnnnnnnnnnnnnnnnnnnnnnnnnnnnnnnnnnnnnnnnnnnnnnnnnnnnnnnnnnnnnnnnnnnnnnnnnnnnnnnnnnnnnnnnnnnnnnnnnnnnnnnnnnnnnnnnnnnnnnnnnnnnnnnnnnnnnnnnnnnnnnnnnnnnnnnnnnnnnnnnnnnnnnnnnnnnnnnnnnnnnnnnnnnnnnnnnnnnnnnnnnnnnnnnnnnnnnnnnnnnnnnnnnnnnnnnnnnnnnnnnnnnnnnnnnnnnnnnnnnnnnnnnnnnnnnnnnnnnnnnnnnnnnnnnnnnnnnnnnnnnnnnnnnnnnnnnnnnnnnnnnnnnnnnnnnnnnnnnnnnnnnnnnnnnnnnnnnnnnnnnnnnnnnnnnnnnnnnnnnnnnnnnnnnnnnnnnnnnnnnnnnnnnnnnnnnnnnnnnnnnnnnnnnnnnnnnnnnnnnnnnnnnnnnnnnnnnnnnnnnnnnnnnnnnnnnnnnnnnnnnnnnnnnnnnnnnnnnnnnnnnnnnnnnnnnnnnnnnnnnnnnnnnnnnnnnnnnnnnnnnnnnnnnnnnnnnnnnnnnnnnnnnnnnnnnnnnnnnnnnnnnnnnnnnnnnnnnnnnnnnnnnnnnnnnnnnnnnnnnnnnnnnnnnnnnnnnnnnnnnnnnnnnnnnnnnnnnnnnnnnnnnnnnnnnnnnnnnnnnnnnnnnnnnnnnnnnnnnnnnnnnnnnnnnnnnnnnnnnnnnnnnnnnnnnnnnnnnnnnnnnnnnnnnnnnnnnnnnnnnnnnnnnnnnnnnnnnnnnnnnnnnnnnnnnnnnnnnnnnnnnnnnnnnnnnnnnnnnnnnnnnnnnnnnnnnnnnnnnnnnnnnnnnnnnnnnnnnnnnnnnnnnnnnnnnnnnnnnnnnnnnnnnnnnnnnnnnnnnnnnnnnnnnnnnnnnnnnnnnnnnnnnnnnnnnnnnnnnnnnnnnnnnnnnnnnnnnnnnnnnnnnnnnnnnnnnnnnnnnnnnnnnnnnnnnnnnnnnnnnnnnnnnnnnnnnnnnnnnnnnnnnnnnnnnnnnnnnnnnnnnnnnnnnnnnnnnnnnnnnnnnnnnnnnnnnnnnnnnnnnnnnnnnnnnnnnnnnnnnnnnnnnnnnnnnnnnnnnnnnnnnnnnnnnnnnnnnnnnnnnnnnnnnnnnnnnnnnnnnnnnnnnnnnnnnnnnnnnnnnnnnnnnnnnnnnnnnnnnnnnnnnnnnnnnnnnnnnnnnnnnnnnnnnnnnnnnnnnnnnnnnnnnnnnnnnnnnnnnnnnnnnnnnnnnnnnnnnnnnnnnnnnnnnnnnnnnnnnnnnnnnnnnnnnnnnnnnnnnnnnnnnnnnnnnnnnnnnnnnnnnnnnnnnnnnnnnnnnnnnnnnnnnnnnnnnnnnnnnnnnnnnnnnnnnnnnnnnnnnnnnnnnnnnnnnnnnnnnnnnnnnnnnnnnnnnnnnnnnnnnnnnnnnnnnnnnnnnnnnnnnnnnnnnnnnnnnnnnnnnnnnnnnnnnnnnnnnnnnnnnnnnnnnnnnnnnnnnnnnnnnnnnnnnnnnnnnnnnnnnnnnnnnnnnnnnnnnnnnnnnnnnnnnnnnnnnnnnnnnnnnnnnnnnnnnnnnnnnnnnnnnnnnnnnnnnnnnnnnnnnnnnnnnnnnnnnnnnnnnnnnnnnnnnnnnnnnnnnnnnnnnnnnnnnnnnnnnnnnnnnnnnnnnnnnnnnnnnnnnnnnnnnnnnnnnnnnnnnnnnnnnnnnnnnnnnnnnnnnnnnnnnnnnnnnnnnnnnnnnnnnnnnnnnnnnnnnnnnnnnnnnnnnnnnnnnnnnnnnnnnnnnnnnnnnnnnnnnnnnnnnnnnnnnnnnnnnnnnnnnnnnnnnnnnnnnnnnnnnnnnnnnnnnnnnnnnnnnnnnnnnnnnnnnnnnnnnnnnnnnnnnnnnnnnnnnnnnnnnnnnnnnnnnnnnnnnnnnnnnnnnnnnnnnnnnnnnnnnnnnnnnnnnnnnnnnnnnnnnnnnnnnnnnnnnnnnnnnnnnnnnnnnnnnnnnnnnnnnnnnnnnnnnnnnnnnnnnnnnnnnnnnnnnnnnnnnnnnnnnnnnnnnnnnnnnnnnnnnnnnnnnnnnnnnnnnnnnnnnnnnnnnnnnnnnnnnnnnnnnnnnnnnnnnnnnnnnnnnnnnnnnnnnnnnnnnnnnnnnnnnnnnnnnnnnnnnnnnnnnnnnnnnnnnnnnnnnnnnnnnnnnnnnnnnnnnnnnnnnnnnnnnnnnnnnnnnnnnnnnnnnnnnnnnnnnnnnnnnnnnnnnnnnnnnnnnnnnnnnnnnnnnnnnnnnnnnnnnnnnnnnnnnnnnnnnnnnnnnnnnnnnnnnnnnnnnnnnnnnnnnnnnnnnnnnnnnnnnnnnnnnnnnnnnnnnnnnnnnnnnnnnnnnnnnnnnnnnnnnnnnnnnnnnnnnnnnnnnnnnnnnnnnnnnnnnnnnnnnnnnnnnnnnnnnnnnnnnnnnnnnnnnnnnnnnnnnnnnnnnnnnnnnnnnnnnnnnnnnnnnnnnnnnnnnnnnnnnnnnnnnnnnnnnnnnnnnnnnnnnnnnnnnnnnnnnnnnnnnnnnnnnnnnnnnnnnnnnnnnnnnnnnnnnnnnnnnnnnnnnnnnnnnnnnnnnnnnnnnnnnnnnnnnnnnnnnnnnnnnnnnnnnnnnnnnnnnnnnnnnnnnnnnnnnnnnnnnnnnnnnnnnnnnnnnnnnnnnnnnnnnnnnnnnnnnnnnnnnnnnnnnnnnnnnnnnnnnnnnnnnnnnnnnnnnnnnnnnnnnnnnnnnnnnnnnnnnnnnnnnnnnnnnnnnnnnnnnnnnnnnnnnnnnnnnnnnnnnnnnnnnnnnnnnnnnnnnnnnnnnnnnnnnnnnnnnnnnnnnnnnnnnnnnnnnnnnnnnnnnnnnnnnnnnnnnnnnnnnnnnnnnnnnnnnnnnnnnnnnnnnnnnnnnnnnnnnnnnnnnnnnnnnnnnnnnnnnnnnnnnnnnnnnnnnnnnnnnnnnnnnnnnnnnnnnnnnnnnnnnnnnnnnnnnnnnnnnnnnnnnnnnnnnnnnnnnnnnnnnnnnnnnnnnnnnnnnnnnnnnnnnnnnnnnnnnnnnnnnnnnnnnnnnnnnnnnnnnnnnnnnnnnnnnnnnnnnnnnnnnnnnnnnnnnnnnnnnnnnnnnnnnnnnnnnnnnnnnnnnnnnnnnnnnnnnnnnnnnnnnnnnnnnnnnnnnnnnnnnnnnnnnnnnnnnnnnnnnnnnnnnnnnnnnnnnnnnnnnnnnnnnnnnnnnnnnnnnnnnnnnnnnnnnnnnnnnnnnnnnnnnnnnnnnnnnnnnnnnnnnnnnnnnnnnnnnnnnnnnnnnnnnnnnnnnnnnnnnnnnnnnnnnnnnnnnnnnnnnnnnnnnnnnnnnnnnnnnnnnnnnnnnnnnnnnnnnnnnnnnnnnnnnnnnnnnnnnnnnnnnnnnnnnnnnnnnnnnnnnnnnnnnnnnnnnnnnnnnnnnnnnnnnnnnnnnnnnnnnnnnnnnnnnnnnnnnnnnnnnnnnnnnnnnnnnnnnnnnnnnnnnnnnnnnnnnnnnnnnnnnnnnnnnnnnnnnnnnnnnnnnnnnnnnnnnnnnnnnnnnnnnnnnnnnnnnnnnnnnnnnnnnnnnnnnnnnnnnnnnnnnnnnnnnnnnnnnnnnnnnnnnnnnnnnnnnnnnnnnnnnnnnnnnnnnnnnnnnnnnnnnnnnnnnnnnnnnnnnnnnnnnnnnnnnnnnnnnnnnnnnnnnnnnnnnnnnnnnnnnnnnnnnnnnnnnnnnnnnnnnnnnnnnnnnnnnnnnnnnnnnnnnnnnnnnnnnnnnnnnnnnnnnnnnnnnnnnnnnnnnnnnnnnnnnnnnnnnnnnnnnnnnnnnnnnnnnnnnnnnnnnnnnnnnnnnnnnnnnnnnnnnnnnnnnnnnnnnnnnnnnnnnnnnnnnnnnnnnnnnnnnnnnnnnnnnnnnnnnnnnnnnnnnnnnnnnnnnnnnnnnnnnnnnnnnnnnnnnnnnnnnnnnnnnnnnnnnnnnnnnnnnnnnnnnnnnnnnnnnnnnnnnnnnnnnnnnnnnnnnnnnnnnnnnnnnnnnnnnnnnnnnnnnnnnnnnnnnnnnnnnnnnnnnnnnnnnnnnnnnnnnnnnnnnnnnnnnnnnnnnnnnnnnnnnnnnnnnnnnnnnnnnnnnnnnnnnnnnnnnnnnnnnnnnnnnnnnnnnnnnnnnnnnnnnnnnnnnnnnnnnnnnnnnnnnnnnnnnnnnnnnnnnnnnnnnnnnnnnnnnnnnnnnnnnnnnnnnnnnnnnnnnnnnnnnnnnnnnnnnnnnnnnnnnnnnnnnnnnnnnnnnnnnnnnnnnnnnnnnnnnnnnnnnnnnnnnnnnnnnnnnnnnnnnnnnnnnnnnnnnnnnnnnnnnnnnnnnnnnnnnnnnnnnnnnnnnnnnnnnnnnnnnnnnnnnnnnnnnnnnnnnnnnnnnnnnnnnnnnnnnnnnnnnnnnnnnnnnnnnnnnnnnnnnnnnnnnnnnnnnnnnnnnnnnnnnnnnnnnnnnnnnnnnnnnnnnnnnnnnnnnnnnnnnnnnnnnnnnnnnnnnnnnnnnnnnnnnnnnnnnnnnnnnnnnnnnnnnnnnnnnnnnnnnnnnnnnnnnnnnnnnnnnnnnnnnnnnnnnnnnnnnnnnnnnnnnnnnnnnnnnnnnnnnnnnnnnnnnnnnnnnnnnnnnnnnnnnnnnnnnnnnnnnnnnnnnnnnnnnnnnnnnnnnnnnnnnnnnnnnnnnnnnnnnnnnnnnnnnnnnnnnnnnnnnnnnnnnnnnnnnnnnnnnnnnnnnnnnnnnnnnnnnnnnnnnnnnnnnnnnnnnnnnnnnnnnnnnnnnnnnnnnnnnnnnnnnnnnnnnnnnnnnnnnnnnnnnnnnnnnnnnnnnnnnnnnnnnnnnnnnnnnnnnnnnnnnnnnnnnnnnnnnnnnnnnnnnnnnnnnnnnnnnnnnnnnnnnnnnnnnnnnnnnnnnnnnnnnnnnnnnnnnnnnnnnnnnnnnnnnnnnnnnnnnnnnnnnnnnnnnnnnnnnnnnnnnnnnnnnnnnnnnnnnnnnnnnnnnnnnnnnnnnnnnnnnnnnnnnnnnnnnnnnnnnnnnnnnnnnnnnnnnnnntccccgccggaagtgcggtcagaggctaatatatcatagctgtatagctaagacaagaaaatttcttaatttttcgattttcttgattttttcacagcttctttttgtcgggatgtatgcgccacagggacgatatattgttggggtgggttctacgacatgaacatctggagccccaagaagcgagacgagaaattgaatcacaggcgcgacaatcccgtcaaacgagtgctggtcaagcacccgggcgactggccgtggtcgcgctgcggcgggaggttctatttctggaatgatggttcgatcttgagcatggacaagaggctatgaaggtgtcgacatgccgaggggcgcatacatcccgacaaaaacccgtcgggacgtatgcgccacccgcgaaatcgatcgcaagattccctccgaatcggaacgccgcggaggcatcaaagcttctgcgcttagtcaacggcgcgccttgcagcctgtgaagtgtgggctaagcggacgcgataaccgttgtcgtggtcttcgggccttgcctttgccgcgtcccgggtgtataccttcgccatgattgtcctgtggtagctacgcagcggacggtccggtccccccggggcgcgacgggcctgccacccgcctcttgcccaggcaaggaggaagccgtggagtacaacctgctcgaagaaaagtggattcccgttctgtggaaagatgggcacagcggtcgcgtgggcattagtgaggcccttaggcaagcaggccggattcgccaaatcgcggccagcaacccaatggaccgcctggccatcctgcgtttcctgcttgcgttgctctattggtgcaaagggaatcccccggacgacaagaactcgatttcttcgtttccctctgattggttcaagaaactcgatgacaacaaagactgtttcaaccttcagggcgatgggaagcggttttaccaacgcaagcctaaccgacttgagaagaagctgtccgtcaactatctgatgcaagaagtgccgaccggcacaaacttctggcacttccggcatgggacagatttcagaaacggcttatgtccggcatgctgcgcaatgggcttgttgcgccttccgctctttgctacgtcggccgggcgcggcaagcccccgggcgtcaatcaaaaaccgccgatctacatcgtgccgatgggcgactgcctttccgaaaccctgcgcctctcatggcggaagacgtcggagatgaacctgggcacgcccacatgggaaaatccggacataagcctccctcaacacggcaatgttccattattgataggattaacgtgggtaccgcggcgcgtctggttagacactccggagacaccagagtccaactgcatcgcctgcgggcgcagggaggctctgatacgtcaatgtgtctttgcgggtattgggagcacaaagacaggcgaaggcagtctggcacgaatctggaacgacccgcacaccatcagcgaaggcgacgagattgtgaagcctttcagcgcgcttggcccggccgacgctgcggctgggaagtggacgaaggtcgtggcgggaatcctgtgcggggaaaagccgaaggggaacagtaagttgtgggtcgtcagctttgcgacagtgcagaacgacaaatacctggaagcagccgagcgggagattcaattcttggccgcgctcgacgacgtgaaggttcaggcgagtttgcaagaaatccaggcgtggcagaaggaaggctggaagctcgttggcagagccaaaccgcgagagacttcacgaaacagaggacaccttgaaattctctccgcagtcgccgctgttcgtccccaagccgaggcaacggtttccggaaaaatcgacgagatgatcgcagaaggcggtaaggcatgggaagaggcggcccaggaatatcgtccgttgatggccgccgtcgccaaatcgctttccccgggctacacaaccgcttccctccggaggcgacaagaaattgccgctgtaaagccggacatgcggccaaagagaaacaacaaagacgaagggggggacaagtgactccaacggagcagtacgtcgaagttctgactcgactgaaacccggtgagctcgggctcttgcgcaaccatgccgggcaagggctcgacgaatcggtagagggctttgaccttttcgcaggcctttggtggccgctgcgggcgcaaacccaacgggcgcctcgccgtgaggtggcctggcttgtcgccaaactctacgccctccggcccctcgagcattcaccccgcgagaccctcgctcgccagctcgggcgatcccggccgggcgagaaaacagcgcggcagcgtttcgagcaacgcttcgacaggatgctcacgctgccgcttgctgaaatcgaacccgccctacagtgggcaatcgacctcatagcttccaagcacctcgaactcgactgggtgcggctgacgaacgatctttccatctgggaacgcgaatccacccggctcaaatgggccgaggaatttttgaactgtccaagaggaggagagtcatgttgatccagattcacgccattcagaatcacagcccggccaacctgaaccgggatgacctgggcgcgcccaagacttgcttttttggcggagtcttgcgctcccgtatttccagccagtgccttaagcgcagcatccgcatgagtgaggagttcagacaattgctgggcggagttcgcacccgccagttggcgaaagagattgcggaaaaggtgacgggcaaagacgtcaggaagcgagcggagaacattctcaaagcctgcgggctggagcctaagaaagcaaaaaaacaggaaggagaagacgaacaggaaagtgctgagaggagcaagatgctggtttacaccacccaagaggcgattacacgcatggccgaactcctccagcagggcgacggaaaaacggacgaggccttggcagcggagttcggcaagctcatcagtgaatccgtcgccgtgccggacatggcgctgagcggcaggatgcttgaaacgggagtcctcaaagacacgacggttgaggcatcgcttcaagtcgcccatgccatttccacccatgaggcccggcccgaggtggactactatgtcgccgccgatgatgtccccggcgaggacgcgggcgcaggttacgtggatgaagccatgttcggttcggcatgtttctacaagtatttctccattcattgggaaacgctggtcaaaaacctgaagcccttcgggacgaatcacgaaaaactggcggcccataccgtcggcgccttcattcgcgccgcggccttggccaaccccacgggaaaacaaaatagttttgccgcgcacaaccctcctgacgggatgttggtggaagtcagaaacactcccatcagctacgccaacgccttcgccaaaccggcggctcctcagggcgaacgggacatcatctcgcagagcgtggcgcagcttgcccattatgtgaacgacatagatacgggatacggcaagccgacgaagcggttctggttctctccaaatctccgctatccgttgacggctaccaccacggagagcgaagacggaaaacagaaacagcgtgaggtcccgcttgccgacaaagatgttaagtctcttgacgaactgatagcggctgtactcaaggaaatcggttacgactggcaggaggccaagaaagtggtcctgaatccggaggtgccccatgagcgcaaagacgctgctacttcggcttgaaggtcctcttcaggcatggggcgatcagcaatccaagttcgtcattcggcgcacggccgaggcgccgaccaagtccggcgtcatcgggatgctttgcgcggcattgggcgtttcccggccagaggcccgcgaaggctggcttccaaggctggcccggctgcgcatgggcgtacgcgtcgatgcgccaggggtccgctggtgggattatcacacggtgggtgcggggatgccgatgcgtaccgccgaggggggaaccaagtccggagccatgctcacccgccgcgaatacctttgcgacgcctcgtttctcgtcgctcttcagggcgaaccggacctcattgaggaactggaggcggcaatcaaagcgcccaagtggacactctacctcggcagaaagtgctgccccccttgccgccctctgctggagcatccgggaggtgaattccccgacttgctttctgccctcgaatcggtcccctggcgtcggcggctgaaggacgatccccagccgcgacccgtcgattgcctgcttgattgggaacccaccaacgagcagcccgaggcgcccgatgatgcgctcgtctggtacgacgtgccgttgacattcgagccgccgtcgcaccaaccccgattcgtcatccgcaggcagttgcgcgtcggagcggacggcgacgtaacacttgcggtgcagccaccgcagagcgacacgccaccgcctccgcgcccaagagcggattacacgaacacagagtacaaaaaccgacgcaaggagcggctcgacgacgactatcacttgtgcgttttttgcaagtctcccgccagcaccgtgcagcacatcacgtaccgccgcgcgggcggcggcgaactccgggacgatttgcgctccctctgccgcctctgccacgacgccgtgaccatgatcgagtacgggctcggaatgggcttggaccgcatcaaccccgaagagccccgttggcgcgacaagatcatcgagaagcgggaagagattatcaggttccgctctctggagactcgccgcagacgccttgccgctgaggaggtggaatagccatgtacctctcctgcctcttgattgacgtcggcaccaaccccgaccgccccaggcccgggcggctctggctgcgaaacctccatcacgtccaccagcgcctttgcatggcgtttccatccaaagaccgaatatcccacgatccccacttcctcaagcctttcaaacccgcggactttgccaacaaccaggtccatgtaagacgtgacggcgactccggctttctcttccgcatcgacccgcaaccgggcgggcgggtcgtgatcctcgtccagtctaactctgccgtaaagcctgactggggctacgccttccacaacgcccgttttcttctgaatcctctagccgctccccctcaggtgcaggaattcgacccccgctttgagaagggtcagcggcttcgcttccgtatccgcgccaatctgagtaagaagataaaaaccagcacagagggcgttgatcttacgaggacgcgagaggggacagataagcggggccgcccgaaggcccaaggcaaacgcgtggcgctgacctgggacaaggaccagaaccgcgacgatgtgatacgaaaatggttcgccggcaagggcggccaaggtggattccaagtggaaactttccgggtcttgcagatcgggtggggcgcaggagaccgatccgacccgaggccgacgggcggccgcatgaaatttcgctcggcgttattggaggggacgcttacggttgaggacgcggacagcttcagagaaaccatcgtgggcggcgttgggcacggcaaagccttcggcttcggcctgctttccgtggcgccgctctcgctgtagcggcggtctccgaccgccggtacgtcgatcggagatcgacgctacaatcccttgtcgatcggggatccgtgcaacatttcttgagcggagatcgagccaatatgaaattcaaaccccgcttgcggcgactggactggctctatacgggcagcccaatctactatctcacgctgtgtacgcaggaccgcaaacgctcgttggcaaatcctgcgattcaccgggaattcacgagattctccgaacgggcgagcgattttcttgtttgggtcgggttcttcatgatcatgcctgatcacatccatcttttcgccggcttttgtcgtgagtccccacctttagggaaatggatcaaggcgctgcgcggggatttatccaaagtcctccgggaagatgagggcgagggcacacattgggagaaagactttttcgatcacgtcctgagatcgcaagaatcctatcgggagaaatatgaatatgtccggcagaatccggtccgggccggtttagtcaagcgcccggaagattggccgtaccagggtgagatccatcgcctggttttgtagcggcggtctccgaccgccgtaacgtcgatcggagatcgactacaaccccggtcgatcggagatcgacgctacaaccgccgtcgatcggagatcgacgctacagcacgggctggaggctctgtgagaattcaagatctccacgttctacccaagttcagtgacgggtggagttatctgtacgtcgagcattgccacgtcgatcaggaagagcgggccattgccgtccacgatcaagccgggaaggtgccggtcccctgtgccaatctggctctcctgatgttgggtccgggcgtctcgattactcacgccgccatctccgtgttggcggaccatgggtgcctggtggcttggtgcggggaggagggagtccgcttctacgccgtgggcatgggcgagacgcgcaacgcggccaacttcctgcatcaggcgaggctgtgggcggaccagggtttccatatgcaggtggtgcgccgcctctatcagttgcgattttcggagaagttcgaccctgccctgaccctccagcaaatccgcggcatggagggcgtgcgggtgcgcgatgcctacgccaaggccgcccaggaagccggcatcacgtggtcgggccgcagctataaacgcgatgagtggagcaaggcggaccctgccaaccgagccttgtccgccgctaactcctgcctatatggaatctgccatgctgccatcgtgtcagcaggtttttcgcccgcactcgggtttatccacaccggcaagatgctgtccttcgtctacgatctcgccgacctgtacaaggctgaaattaccgttccagtggcatttcgcgccgccgccgaggggacgggacagttggaacgccgggtgcgcatcacctgccgcgatcagttcgtatccacgcggcttctggagagaatcatcccggatgtccaaagggcgttgatgctggcaaaagcgacggcctgggacactaccttcgacctggatgccgccgcccccggcttcctctgggacaatctggaaggagaggtcgaaggcggccgcctgctagcccccgaaatcggtgaaacggagcccggcgatggtggtcctgattcttgagcgcgtccccccagggttgcgaggcgagctgactcgctggtttttggaacctcaggcgggagtgttcgtgggacgcgtctccgccatggtccgtgatcggctctgggaaaaagcctgcagccaggccaagggaggcgggtgcttgattatctattcaagcgacaatgaacagggctttcgagtccgaacctggggccaaacagctcgggtcatcgatgacttcgagggcctttttctcgttcgcatgccgcagaatcaataatttagtaagtgttgtccccacgcgcgtgggggtgaaccgccggggctgaaggtttcatgggctggaaagaagttgtccccacgcgcgtgggggtgaaccgatatgctgcatgtgccggggctggcgcttgatgttgtccccacgcgcgtgggggtgaaccggtatcggcgagtggcaaggcgaatccacttaggttgtccccacgcgcgtgggggtgaaccgacctccgagggcgcggggcgcgtgctggcgatgttgtccccacgcgcgtgggggtgaaccggctggggccgacgcgcgcttgtgagactgcgggttgtccccacgcgcgtgggggtgaaccgcgggagaactttgaaggcacggtcctcgatcacgttgtccccacgcgcgtgggggtgaaccggcgcaggttaaggctgaggccaaggccgatgcgttgtccccacgcgcgtgggggtgaaccgtaatggtggcttgcaccttctgctcgaccgatgttgtccccacgcgcgtgggggtgaaccgcagcgggccgtgttggaggagaaggtcgcggagttgtccccacgcgcgtgggggtgaaccgttcccagccgcaggcaggatcaccgtaccccagttgtccccacgcgcgtgggggtgaaccgcaaaacaatatcaagaccaagcacttggatgtgttgtccccacgcgcgtgggggtgaaccgcatcgggcagcacagcggccttataccccaaagttgtccccacgcgcgtgggggtgaaccggcagctcgcggcgattcgcattgccgctgaaagttgtccccacgcgcgtgggggtgaaccggggagtcgtgagtgtagttacaggcagggttcgttgtccccacgcgcgtgggggtgaaccgcttctgcatcttataaagaacgccagtttgaagttgtccccacgcgcgtgggggtgaaccggtacggttcccaggggaattatttcttggggtgttgtccccacgcgcgtgggggtgaaccgatgtagcttgatatgggtgtggtgtcgcagaagttgtccccacgcgcgtgggggtgaaccggcggcgcgcacattccaacctcgtccgtatccgttgtccccacgcgcgtgggggtgaaccggcggacacggcggatgtgacgaatatggagtcgttgtccccacgcgcgtgggggtgaaccggtctctcgaaaaggaaagccaactttcagcttgttgtccccacgcgcgtgggggtgaaccgctcttggcatagagcttagtgagtttgatgaagttgtccccacgcgcgtgggggtgaaccgcctttgccctccgagacgcaacagctccattcgttgtccccacgcgcgtgggggtgaaccggcgagcgcaggtctaagcgaccgcgacaaagagttgtccccacgcgcgtgggggtgaaccggtgatggacacttcctaaaatggcattaagtcgttgtccccacgcgcgtgggggtgaaccgcagcgggtagcgcagacttcgtgcatatcgaagtctgcggcttttgccgccgtgaatcttgaaaagccgcagacctgcaaaaagcgcaggtctgcgctacccactgcctggccatcctggagaattgaaagtccctccagtaaagcggcgaagcgcaggatttccggctgcttcaatcgcttgcgacgctcaccggtcagtagcgcgttggtaatttcgagcccccatacggctggaacaacgagcgtctgcccttcagtgccaccaggaccccgtccgcgtattcgctcgcttcatccggggagcaccaggcaagcgccaccgacgcatgcaccacaacgccgctcaaaatcgccgtccctcaattatcatttcgcggacgctcatggtgtggggctttacgcgcttgcgcaacgcgcgcatgccctcgacaatctcctcgtgcgtcagctttcgatccgagtctcgaaccggcaccagcattgccgccggaacgccgtgtcttgtaatcgtgatcctttcgcaacccatcttgtccagctaaagctccgcatcagctatagtctccctctggccgtgcggcccgccccttgcggcgcaaccaaaccgaagctcaaaacgcgacatcgtcctcgtagcgcgaccggacactgaaggtaaaggttcgccacccgtctcccctgcaaaaccgggtcgcggagtactattgctttgcacagcgggggacgaccgaggcgctacggaagaggttggttcgcgaaactgagcaagagacccctcacccgtcccgctccggctggtggaagcgccggagcgggacacgctcagccccaagggagagggctatggattcagttctacgcgcggtgtccagtcaaagatgtgggacacgctcagccccaagggagagggctatggattcagttctacg

SEQ ID NO: 1057 - DNA, 106279 bp, Artificial Sequence; identical to SEQ ID NO: 1056
  Synthetic Oligonucleotide
  misc_feature (1)..(96242): n is a, c, g, or t

SEQ ID NO: 1058 - DNA, 106266 bp, Artificial Sequence
  Synthetic Oligonucleotide
  misc_feature (1)..(96244): n is a, c, g, or t
nnnnnnnnnnnnnnnnnnnnnnnnnnnnnnnnnnnnnnnnnnnnnnnnnnnnnnnnnnnnnnnnnnnnnnnnnnnnnnnnnnnnnnnnnnnnnnnnnnnnnnnnnnnnnnnnnnnnnnnnnnnnnnnnnnnnnnnnnnnnnnnnnnnnnnnnnnnnnnnnnnnnnnnnnnnnnnnnnnnnnnnnnnnnnnnnnnnnnnnnnnnnnnnnnnnnnnnnnnnnnnnnnnnnnnnnnnnnnnnnnnnnnnnnnnnnnnnnnnnnnnnnnnnnnnnnnnnnnnnnnnnnnnnnnnnnnnnnnnnnnnnnnnnnnnnnnnnnnnnnnnnnnnnnnnnnnnnnnnnnnnnnnnnnnnnnnnnnnnnnnnnnnnnnnnnnnnnnnnnnnnnnnnnnnnnnnnnnnnnnnnnnnnnnnnnnnnnnnnnnnnnnnnnnnnnnnnnnnnnnnnnnnnnnnnnnnnnnnnnnnnnnnnnnnnnnnnnnnnnnnnnnnnnnnnnnnnnnnnnnnnnnnnnnnnnnnnnnnnnnnnnnnnnnnnnnnnnnnnnnnnnnnnnnnnnnnnnnnnnnnnnnnnnnnnnnnnnnnnnnnnnnnnnnnnnnnnnnnnnnnnnnnnnnnnnnnnnnnnnnnnnnnnnnnnnnnnnnnnnnnnnnnnnnnnnnnnnnnnnnnnnnnnnnnnnnnnnnnnnnnnnnnnnnnnnnnnnnnnnnnnnnnnnnnnnnnnnnnnnnnnnnnnnnnnnnnnnnnnnnnnnnnnnnnnnnnnnnnnnnnnnnnnnnnnnnnnnnnnnnnnnnnnnnnnnnnnnnnnnnnnnnnnnnnnnnnnnnnnnnnnnnnnnnnnnnnnnnnnnnnnnnnnnnnnnnnnnnnnnnnnnnnnnnnnnnnnnnnnnnnnnnnnnnnnnnnnnnnnnnnnnnnnnnnnnnnnnnnnnnnnnnnnnnnnnnnnnnnnnnnnnnnnnnnnnnnnnnnnnnnnnnnnnnnnnnnnnnnnnnnnnnnnnnnnnnnnnnnnnnnnnnnnnnnnnnnnnnnnnnnnnnnnnnnnnnnnnnnnnnnnnnnnnnnnnnnnnnnnnnnnnnnnnnnnnnnnnnnnnnnnnnnnnnnnnnnnnnnnnnnnnnnnnnnnnnnnnnnnnnnnnnnnnnnnnnnnnnnnnnnnnnnnnnnnnnnnnnnnnnnnnnnnnnnnnnnnnnnnnnnnnnnnnnnnnnnnnnnnnnnnnnnnnnnnnnnnnnnnnnnnnnnnnnnnnnnnnnnnnnnnnnnnnnnnnnnnnnnnnnnnnnnnnnnnnnnnnnnnnnnnnnnnnnnnnnnnnnnnnnnnnnnnnnnnnnnnnnnnnnnnnnnnnnnnnnnnnnnnnnnnnnnnnnnnnnnnnnnnnnnnnnnnnnnnnnnnnnnnnnnnnnnnnnnnnnnnnnnnnnnnnnnnnnnnnnnnnnnnnnnnnnnnnnnnnnnnnnnnnnnnnnnnnnnnnnnnnnnnnnnnnnnnnnnnnnnnnnnnnnnnnnnnnnnnnnnnnnnnnnnnnnnnnnnnnnnnnnnnnnnnnnnnnnnnnnnnnnnnnnnnnnnnnnnnnnnnnnnnnnnnnnnnnnnnnnnnnnnnnnnnnnnnnnnnnnnnnnnnnnnnnnnnnnnnnnnnnnnnnnnnnnnnnnnnnnnnnnnnnnnnnnnnnnnnnnnnnnnnnnnnnnnnnnnnnnnnnnnnnnnnnnnnnnnnnnnnnnnnnnnnnnnnnnnnnnnnnnnnnnnnnnnnnnnnnnnnnnnnnnnnnnnnnnnnnnnnnnnnnnnnnnnnnnnnnnnnnnnnnnnnnnnnnnnnnnnnnnnnnnnnnnnnnnnnnnnnnnnnnnnnnnnnnnnnnnnnnnnnnnnnnnnnnnnnnnnnnnnnnnnnnnnnnnnnnnnnnnnnnnnnnnnnnnnnnnnnnnnnnnnnnnnnnnnnnnnnnnnnnnnnnnnnnnnnnnnnnnnnnnnnnnnnnnnnnnnnnnnnnnnnnnnnnnnnnnnnnnnnnnnnnnnnnnnnnnnnnnnnnnnnnnnnnnnnnnnnnnnnnnnnnnnnnnnnnnnnnnnnnnnnnnnnnnnnnnnnnnnnnnnnnnnnnnnnnnnnnnnnnnnnnnnnnnnnnnnnnnnnnnnnnnnnnnnnnnnnnnnnnnnnnnnnnnnnnnnnnnnnnnnnnnnnnnnnnnnnnnnnnnnnnnnnnnnnnnnnnnnnnnnnnnnnnnnnnnnnnnnnnnnnnnnnnnnnnnnnnnnnnnnnnnnnnnnnnnnnnnnnnnnnnnnnnnnnnnnnnnnnnnnnnnnnnnnnnnnnnnnnnnnnnnnnnnnnnnnnnnnnnnnnnnnnnnnnnnnnnnnnnnnnnnnnnnnnnnnnnnnnnnnnnnnnnnnnnnnnnnnnnnnnnnnnnnnnnnnnnnnnnnnnnnnnnnnnnnnnnnnnnnnnnnnnnnnnnnnnnnnnnnnnnnnnnnnnnnnnnnnnnnnnnnnnnnnnnnnnnnnnnnnnnnnnnnnnnnnnnnnnnnnnnnnnnnnnnnnnnnnnnnnnnnnnnnnnnnnnnnnnnnnnnnnnnnnnnnnnnnnnnnnnnnnnnnnnnnnnnnnnnnnnnnnnnnnnnnnnnnnnnnnnnnnnnnnnnnnnnnnnnnnnnnnnnnnnnnnnnnnnnnnnnnnnnnnnnnnnnnnnnnnnnnnnnnnnnnnnnnnnnnnnnnnnnnnnnnnnnnnnnnnnnnnnnnnnnnnnnnnnnnnnnnnnnnnnnnnnnnnnnnnnnnnnnnnnnnnnnnnnnnnnnnnnnnnnnnnnnnnnnnnnnnnnnnnnnnnnnnnnnnnnnnnnnnnnnnnnnnnnnnnnnnnnnnnnnnnnnnnnnnnnnnnnnnnnnnnnnnnnnnnnnnnnnnnnnnnnnnnnnnnnnnnnnnnnnnnnnnnnnnnnnnnnnnnnnnnnnnnnnnnnnnnnnnnnnnnnnnnnnnnnnnnnnnnnnnnnnnnnnnnnnnnnnnnnnnnnnnnnnnnnnnnnnnnnnnnnnnnnnnnnnnnnnnnnnnnnnnnnnnnnnnnnnnnnnnnnnnnnnnnnnnnnnnnnnnnnnnnnnnnnnnnnnnnnnnnnnnnnnnnnnnnnnnnnnnnnnnnnnnnnnnnnnnnnnnnnnnnnnnnnnnnnnnnnnnnnnnnnnnnnnnnnnnnnnnnnnnnnnnnnnnnnnnnnnnnnnnnnnnnnnnnnnnnnnnnnnnnnnnnnnnnnnnnnnnnnnnnnnnnnnnnnnnnnnnnnnnnnnnnnnnnnnnnnnnnnnnnnnnnnnnnnnnnnnnnnnnnnnnnnnnnnnnnnnnnnnnnnnnnnnnnnnnnnnnnnnnnnnnnnnnnnnnnnnnnnnnnnnnnnnnnnnnnnnnnnnnnnnnnnnnnnnnnnnnnnnnnnnnnnnnnnnnnnnnnnnnnnnnnnnnnnnnnnnnnnnnnnnnnnnnnnnnnnnnnnnnnnnnnnnnnnnnnnnnnnnnnnnnnnnnnnnnnnnnnnnnnnnnnnnnnnnnnnnnnnnnnnnnnnnnnnnnnnnnnnnnnnnnnnnnnnnnnnnnnnnnnnnnnnnnnnnnnnnnnnnnnnnnnnnnnnnnnnnnnnnnnnnnnnnnnnnnnnnnnnnnnnnnnnnnnnnnnnnnnnnnnnnnnnnnnnnnnnnnnnnnnnnnnnnnnnnnnnnnnnnnnnnnnnnnnnnnnnnnnnnnnnnnnnnnnnnnnnnnnnnnnnnnnnnnnnnnnnnnnnnnnnnnnnnnnnnnnnnnnnnnnnnnnnnnnnnnnnnnnnnnnnnnnnnnnnnnnnnnnnnnnnnnnnnnnnnnnnnnnnnnnnnnnnnnnnnnnnnnnnnnnnnnnnnnnnnnnnnnnnnnnnnnnnnnnnnnnnnnnnnnnnnnnnnnnnnnnnnnnnnnnnnnnnnnnnnnnnnnnnnnnnnnnnnnnnnnnnnnnnnnnnnnnnnnnnnnnnnnnnnnnnnnnnnnnnnnnnnnnnnnnnnnnnnnnnnnnnnnnnnnnnnnnnnnnnnnnnnnnnnnnnnnnnnnnnnnnnnnnnnnnnnnnnnnnnnnnnnnnnnnnnnnnnnnnnnnnnnnnnnnnnnnnnnnnnnnnnnnnnnnnnnnnnnnnnnnnnnnnnnnnnnnnnnnnnnnnnnnnnnnnnnnnnnnnnnnnnnnnnnnnnnnnnnnnnnnnnnnnnnnnnnnnnnnnnnnnnnnnnnnnnnnnnnnnnnnnnnnnnnnnnnnnnnnnnnnnnnnnnnnnnnnnnnnnnnnnnnnnnnnnnnnnnnnnnnnnnnnnnnnnnnnnnnnnnnnnnnnnnnnnnnnnnnnnnnnnnnnnnnnnnnnnnnnnnnnnnnnnnnnnnnnnnnnnnnnnnnnnnnnnnnnnnnnnnnnnnnnnnnnnnnnnnnnnnnnnnnnnnnnnnnnnnnnnnnnnnnnnnnnnnnnnnnnnnnnnnnnnnnnnnnnnnnnnnnnnnnnnnnnnnnnnnnnnnnnnnnnnnnnnnnnnnnnnnnnnnnnnnnnnnnnnnnnnnnnnnnnnnnnnnnnnnnnnnnnnnnnnnnnnnnnnnnnnnnnnnnnnnnnnnnnnnnnnnnnnnnnnnnnnnnnnnnnnnnnnnnnnnnnnnnnnnnnnnnnnnnnnnnnnnnnnnnnnnnnnnnnnnnnnnnnnnnnnnnnnnnnnnnnnnnnnnnnnnnnnnnnnnnnnnnnnnnnnnnnnnnnnnnnnnnnnnnnnnnnnnnnnnnnnnnnnnnnnnnnnnnnnnnnnnnnnnnnnnnnnnnnnnnnnnnnnnnnnnnnnnnnnnnnnnnnnnnnnnnnnnnnnnnnnnnnnnnnnnnnnnnnnnnnnnnnnnnnnnnnnnnnnnnnnnnnnnnnnnnnnnnnnnnnnnnnnnnnnnnnnnnnnnnnnnnnnnnnnnnnnnnnnnnnnnnnnnnnnnnnnnnnnnnnnnnnnnnnnnnnnnnnnnnnnnnnnnnnnnnnnnnnnnnnnnnnnnnnnnnnnnnnnnnnnnnnnnnnnnnnnnnnnnnnnnnnnnnnnnnnnnnnnnnnnnnnnnnnnnnnnnnnnnnnnnnnnnnnnnnnnnnnnnnnnnnnnnnnnnnnnnnnnnnnnnnnnnnnnnnnnnnnnnnnnnnnnnnnnnnnnnnnnnnnnnnnnnnnnnnnnnnnnnnnnnnnnnnnnnnnnnnnnnnnnnnnnnnnnnnnnnnnnnnnnnnnnnnnnnnnnnnnnnnnnnnnnnnnnnnnnnnnnnnnnnnnnnnnnnnnnnnnnnnnnnnnnnnnnnnnnnnnnnnnnnnnnnnnnnnnnnnnnnnnnnnnnnnnnnnnnnnnnnnnnnnnnnnnnnnnnnnnnnnnnnnnnnnnnnnnnnnnnnnnnnnnnnnnnnnnnnnnnnnnnnnnnnnnnnnnnnnnnnnnnnnnnnnnnnnnnnnnnnnnnnnnnnnnnnnnnnnnnnnnnnnnnnnnnnnnnnnnnnnnnnnnnnnnnnnnnnnnnnnnnnnnnnnnnnnnnnnnnnnnnnnnnnnnnnnnnnnnnnnnnnnnnnnnnnnnnnnnnnnnnnnnnnnnnnnnnnnnnnnnnnnnnnnnnnnnnnnnnnnnnnnnnnnnnnnnnnnnnnnnnnnnnnnnnnnnnnnnnnnnnnnnnnnnnnnnnnnnnnnnnnnnnnnnnnnnnnnnnnnnnnnnnnnnnnnnnnnnnnnnnnnnnnnnnnnnnnnnnnnnnnnnnnnnnnnnnnnnnnnnnnnnnnnnnnnnnnnnnnnnnnnnnnnnnnnnnnnnnnnnnnnnnnnnnnnnnnnnnnnnnnnnnnnnnnnnnnnnnnnnnnnnnnnnnnnnnnnnnnnnnnnnnnnnnnnnnnnnnnnnnnnnnnnnnnnnnnnnnnnnnnnnnnnnnnnnnnnnnnnnnnnnnnnnnnnnnnnnnnnnnnnnnnnnnnnnnnnnnnnnnnnnnnnnnnnnnnnnnnnnnnnnnnnnnnnnnnnnnnnnnnnnnnnnnnnnnnnnnnnnnnnnnnnnnnnnnnnnnnnnnnnnnnnnnnnnnnnnnnnnnnnnnnnnnnnnnnnnnnnnnnnnnnnnnnnnnnnnnnnnnnnnnnnnnnnnnnnnnnnnnnnnnnnnnnnnnnnnnnnnnnnnnnnnnnnnnnnnnnnnnnnnnnnnnnnnnnnnnnnnnnnnnnnnnnnnnnnnnnnnnnnnnnnnnnnnnnnnnnnnnnnnnnnnnnnnnnnnnnnnnnnnnnnnnnnnnnnnnnnnnnnnnnnnnnnnnnnnnnnnnnnnnnnnnnnnnnnnnnnnnnnnnnnnnnnnnnnnnnnnnnnnnnnnnnnnnnnnnnnnnnnnnnnnnnnnnnnnnnnnnnnnnnnnnnnnnnnnnnnnnnnnnnnnnnnnnnnnnnnnnnnnnnnnnnnnnnnnnnnnnnnnnnnnnnnnnnnnnnnnnnnnnnnnnnnnnnnnnnnnnnnnnnnnnnnnnnnnnnnnnnnnnnnnnnnnnnnnnnnnnnnnnnnnnnnnnnnnnnnnnnnnnnnnnnnnnnnnnnnnnnnnnnnnnnnnnnnnnnnnnnnnnnnnnnnnnnnnnnnnnnnnnnnnnnnnnnnnnnnnnnnnnnnnnnnnnnnnnnnnnnnnnnnnnnnnnnnnnnnnnnnnnnnnnnnnnnnnnnnnnnnnnnnnnnnnnnnnnnnnnnnnnnnnnnnnnnnnnnnnnnnnnnnnnnnnnnnnnnnnnnnnnnnnnnnnnnnnnnnnnnnnnnnnnnnnnnnnnnnnnnnnnnnnnnnnnnnnnnnnnnnnnnnnnnnnnnnnnnnnnnnnnnnnnnnnnnnnnnnnnnnnnnnnnnnnnnnnnnnnnnnnnnnnnnnnnnnnnnnnnnnnnnnnnnnnnnnnnnnnnnnnnnnnnnnnnnnnnnnnnnnnnnnnnnnnnnnnnnnnnnnnnnnnnnnnnnnnnnnnnnnnnnnnnnnnnnnnnnnnnnnnnnnnnnnnnnnnnnnnnnnnnnnnnnnnnnnnnnnnnnnnnnnnnnnnnnnnnnnnnnnnnnnnnnnnnnnnnnnnnnnnnnnnnnnnnnnnnnnnnnnnnnnnnnnnnnnnnnnnnnnnnnnnnnnnnnnnnnnnnnnnnnnnnnnnnnnnnnnnnnnnnnnnnnnnnnnnnnnnnnnnnnnnnnnnnnnnnnnnnnnnnnnnnnnnnnnnnnnnnnnnnnnnnnnnnnnnnnnnnnnnnnnnnnnnnnnnnnnnnnnnnnnnnnnnnnnnnnnnnnnnnnnnnnnnnnnnnnnnnnnnnnnnnnnnnnnnnnnnnnnnnnnnnnnnnnnnnnnnnnnnnnnnnnnnnnnnnnnnnnnnnnnnnnnnnnnnnnnnnnnnnnnnnnnnnnnnnnnnnnnnnnnnnnnnnnnnnnnnnnnnnnnnnnnnnnnnnnnnnnnnnnnnnnnnnnnnnnnnnnnnnnnnnnnnnnnnnnnnnnnnnnnnnnnnnnnnnnnnnnnnnnnnnnnnnnnnnnnnnnnnnnnnnnnnnnnnnnnnnnnnnnnnnnnnnnnnnnnnnnnnnnnnnnnnnnnnnnnnnnnnnnnnnnnnnnnnnnnnnnnnnnnnnnnnnnnnnnnnnnnnnnnnnnnnnnnnnnnnnnnnnnnnnnnnnnnnnnnnnnnnnnnnnnnnnnnnnnnnnnnnnnnnnnnnnnnnnnnnnnnnnnnnnnnnnnnnnnnnnnnnnnnnnnnnnnnnnnnnnnnnnnnnnnnnnnnnnnnnnnnnnnnnnnnnnnnnnnnnnnnnnnnnnnnnnnnnnnnnnnnnnnnnnnnnnnnnnnnnnnnnnnnnnnnnnnnnnnnnnnnnnnnnnnnnnnnnnnnnnnnnnnnnnnnnnnnnnnnnnnnnnnnnnnnnnnnnnnnnnnnnnnnnnnnnnnnnnnnnnnnnnnnnnnnnnnnnnnnnnnnnnnnnnnnnnnnnnnnnnnnnnnnnnnnnnnnnnnnnnnnnnnnnnnnnnnnnnnnnnnnnnnnnnnnnnnnnnnnnnnnnnnnnnnnnnnnnnnnnnnnnnnnnnnnnnnnnnnnnnnnnnnnnnnnnnnnnnnnnnnnnnnnnnnnnnnnnnnnnnnnnnnnnnnnnnnnnnnnnnnnnnnnnnnnnnnnnnnnnnnnnnnnnnnnnnnnnnnnnnnnnnnnnnnnnnnnnnnnnnnnnnnnnnnnnnnnnnnnnnnnnnnnnnnnnnnnnnnnnnnnnnnnnnnnnnnnnnnnnnnnnnnnnnnnnnnnnnnnnnnnnnnnnnnnnnnnnnnnnnnnnnnnnnnnnnnnnnnnnnnnnnnnnnnnnnnnnnnnnnnnnnnnnnnnnnnnnnnnnnnnnnnnnnnnnnnnnnnnnnnnnnnnnnnnnnnnnnnnnnnnnnnnnnnnnnnnnnnnnnnnnnnnnnnnnnnnnnnnnnnnnnnnnnnnnnnnnnnnnnnnnnnnnnnnnnnnnnnnnnnnnnnnnnnnnnnnnnnnnnnnnnnnnnnnnnnnnnnnnnnnnnnnnnnnnnnnnnnnnnnnnnnnnnnnnnnnnnnnnnnnnnnnnnnnnnnnnnnnnnnnnnnnnnnnnnnnnnnnnnnnnnnnnnnnnnnnnnnnnnnnnnnnnnnnnnnnnnnnnnnnnnnnnnnnnnnnnnnnnnnnnnnnnnnnnnnnnnnnnnnnnnnnnnnnnnnnnnnnnnnnnnnnnnnnnnnnnnnnnnnnnnnnnnnnnnnnnnnnnnnnnnnnnnnnnnnnnnnnnnnnnnnnnnnnnnnnnnnnnnnnnnnnnnnnnnnnnnnnnnnnnnnnnnnnnnnnnnnnnnnnnnnnnnnnnnnnnnnnnnnnnnnnnnnnnnnnnnnnnnnnnnnnnnnnnnnnnnnnnnnnnnnnnnnnnnnnnnnnnnnnnnnnnnnnnnnnnnnnnnnnnnnnnnnnnnnnnnnnnnnnnnnnnnnnnnnnnnnnnnnnnnnnnnnnnnnnnnnnnnnnnnnnnnnnnnnnnnnnnnnnnnnnnnnnnnnnnnnnnnnnnnnnnnnnnnnnnnnnnnnnnnnnnnnnnnnnnnnnnnnnnnnnnnnnnnnnnnnnnnnnnnnnnnnnnnnnnnnnnnnnnnnnnnnnnnnnnnnnnnnnnnnnnnnnnnnnnnnnnnnnnnnnnnnnnnnnnnnnnnnnnnnnnnnnnnnnnnnnnnnnnnnnnnnnnnnnnnnnnnnnnnnnnnnnnnnnnnnnnnnnnnnnnnnnnnnnnnnnnnnnnnnnnnnnnnnnnnnnnnnnnnnnnnnnnnnnnnnnnnnnnnnnnnnnnnnnnnnnnnnnnnnnnnnnnnnnnnnnnnnnnnnnnnnnnnnnnnnnnnnnnnnnnnnnnnnnnnnnnnnnnnnnnnnnnnnnnnnnnnnnnnnnnnnnnnnnnnnnnnnnnnnnnnnnnnnnnnnnnnnnnnnnnnnnnnnnnnnnnnnnnnnnnnnnnnnnnnnnnnnnnnnnnnnnnnnnnnnnnnnnnnnnnnnnnnnnnnnnnnnnnnnnnnnnnnnnnnnnnnnnnnnnnnnnnnnnnnnnnnnnnnnnnnnnnnnnnnnnnnnnnnnnnnnnnnnnnnnnnnnnnnnnnnnnnnnnnnnnnnnnnnnnnnnnnnnnnnnnnnnnnnnnnnnnnnnnnnnnnnnnnnnnnnnnnnnnnnnnnnnnnnnnnnnnnnnnnnnnnnnnnnnnnnnnnnnnnnnnnnnnnnnnnnnnnnnnnnnnnnnnnnnnnnnnnnnnnnnnnnnnnnnnnnnnnnnnnnnnnnnnnnnnnnnnnnnnnnnnnnnnnnnnnnnnnnnnnnnnnnnnnnnnnnnnnnnnnnnnnnnnnnnnnnnnnnnnnnnnnnnnnnnnnnnnnnnnnnnnnnnnnnnnnnnnnnnnnnnnnnnnnnnnnnnnnnnnnnnnnnnnnnnnnnnnnnnnnnnnnnnnnnnnnnnnnnnnnnnnnnnnnnnnnnnnnnnnnnnnnnnnnnnnnnnnnnnnnnnnnnnnnnnnnnnnnnnnnnnnnnnnnnnnnnnnnnnnnnnnnnnnnnnnnnnnnnnnnnnnnnnnnnnnnnnnnnnnnnnnnnnnnnnnnnnnnnnnnnnnnnnnnnnnnnnnnnnnnnnnnnnnnnnnnnnnnnnnnnnnnnnnnnnnnnnnnnnnnnnnnnnnnnnnnnnnnnnnnnnnnnnnnnnnnnnnnnnnnnnnnnnnnnnnnnnnnnnnnnnnnnnnnnnnnnnnnnnnnnnnnnnnnnnnnnnnnnnnnnnnnnnnnnnnnnnnnnnnnnnnnnnnnnnnnnnnnnnnnnnnnnnnnnnnnnnnnnnnnnnnnnnnnnnnnnnnnnnnnnnnnnnnnnnnnnnnnnnnnnnnnnnnnnnnnnnnnnnnnnnnnnnnnnnnnnnnnnnnnnnnnnnnnnnnnnnnnnnnnnnnnnnnnnnnnnnnnnnnnnnnnnnnnnnnnnnnnnnnnnnnnnnnnnnnnnnnnnnnnnnnnnnnnnnnnnnnnnnnnnnnnnnnnnnnnnnnnnnnnnnnnnnnnnnnnnnnnnnnnnnnnnnnnnnnnnnnnnnnnnnnnnnnnnnnnnnnnnnnnnnnnnnnnnnnnnnnnnnnnnnnnnnnnnnnnnnnnnnnnnnnnnnnnnnnnnnnnnnnnnnnnnnnnnnnnnnnnnnnnnnnnnnnnnnnnnnnnnnnnnnnnnnnnnnnnnnnnnnnnnnnnnnnnnnnnnnnnnnnnnnnnnnnnnnnnnnnnnnnnnnnnnnnnnnnnnnnnnnnnnnnnnnnnnnnnnnnnnnnnnnnnnnnnnnnnnnnnnnnnnnnnnnnnnnnnnnnnnnnnnnnnnnnnnnnnnnnnnnnnnnnnnnnnnnnnnnnnnnnnnnnnnnnnnnnnnnnnnnnnnnnnnnnnnnnnnnnnnnnnnnnnnnnnnnnnnnnnnnnnnnnnnnnnnnnnnnnnnnnnnnnnnnnnnnnnnnnnnnnnnnnnnnnnnnnnnnnnnnnnnnnnnnnnnnnnnnnnnnnnnnnnnnnnnnnnnnnnnnnnnnnnnnnnnnnnnnnnnnnnnnnnnnnnnnnnnnnnnnnnnnnnnnnnnnnnnnnnnnnnnnnnnnnnnnnnnnnnnnnnnnnnnnnnnnnnnnnnnnnnnnnnnnnnnnnnnnnnnnnnnnnnnnnnnnnnnnnnnnnnnnnnnnnnnnnnnnnnnnnnnnnnnnnnnnnnnnnnnnnnnnnnnnnnnnnnnnnnnnnnnnnnnnnnnnnnnnnnnnnnnnnnnnnnnnnnnnnnnnnnnnnnnnnnnnnnnnnnnnnnnnnnnnnnnnnnnnnnnnnnnnnnnnnnnnnnnnnnnnnnnnnnnnnnnnnnnnnnnnnnnnnnnnnnnnnnnnnnnnnnnnnnnnnnnnnnnnnnnnnnnnnnnnnnnnnnnnnnnnnnnnnnnnnnnnnnnnnnnnnnnnnnnnnnnnnnnnnnnnnnnnnnnnnnnnnnnnnnnnnnnnnnnnnnnnnnnnnnnnnnnnnnnnnnnnnnnnnnnnnnnnnnnnnnnnnnnnnnnnnnnnnnnnnnnnnnnnnnnnnnnnnnnnnnnnnnnnnnnnnnnnnnnnnnnnnnnnnnnnnnnnnnnnnnnnnnnnnnnnnnnnnnnnnnnnnnnnnnnnnnnnnnnnnnnnnnnnnnnnnnnnnnnnnnnnnnnnnnnnnnnnnnnnnnnnnnnnnnnnnnnnnnnnnnnnnnnnnnnnnnnnnnnnnnnnnnnnnnnnnnnnnnnnnnnnnnnnnnnnnnnnnnnnnnnnnnnnnnnnnnnnnnnnnnnnnnnnnnnnnnnnnnnnnnnnnnnnnnnnnnnnnnnnnnnnnnnnnnnnnnnnnnnnnnnnnnnnnnnnnnnnnnnnnnnnnnnnnnnnnnnnnnnnnnnnnnnnnnnnnnnnnnnnnnnnnnnnnnnnnnnnnnnnnnnnnnnnnnnnnnnnnnnnnnnnnnnnnnnnnnnnnnnnnnnnnnnnnnnnnnnnnnnnnnnnnnnnnnnnnnnnnnnnnnnnnnnnnnnnnnnnnnnnnnnnnnnnnnnnnnnnnnnnnnnnnnnnnnnnnnnnnnnnnnnnnnnnnnnnnnnnnnnnnnnnnnnnnnnnnnnnnnnnnnnnnnnnnnnnnnnnnnnnnnnnnnnnnnnnnnnnnnnnnnnnnnnnnnnnnnnnnnnnnnnnnnnnnnnnnnnnnnnnnnnnnnnnnnnnnnnnnnnnnnnnnnnnnnnnnnnnnnnnnnnnnnnnnnnnnnnnnnnnnnnnnnnnnnnnnnnnnnnnnnnnnnnnnnnnnnnnnnnnnnnnnnnnnnnnnnnnnnnnnnnnnnnnnnnnnnnnnnnnnnnnnnnnnnnnnnnnnnnnnnnnnnnnnnnnnnnnnnnnnnnnnnnnnnnnnnnnnnnnnnnnnnnnnnnnnnnnnnnnnnnnnnnnnnnnnnnnnnnnnnnnnnnnnnnnnnnnnnnnnnnnnnnnnnnnnnnnnnnnnnnnnnnnnnnnnnnnnnnnnnnnnnnnnnnnnnnnnnnnnnnnnnnnnnnnnnnnnnnnnnnnnnnnnnnnnnnnnnnnnnnnnnnnnnnnnnnnnnnnnnnnnnnnnnnnnnnnnnnnnnnnnnnnnnnnnnnnnnnnnnnnnnnnnnnnnnnnnnnnnnnnnnnnnnnnnnnnnnnnnnnnnnnnnnnnnnnnnnnnnnnnnnnnnnnnnnnnnnnnnnnnnnnnnnnnnnnnnnnnnnnnnnnnnnnnnnnnnnnnnnnnnnnnnnnnnnnnnnnnnnnnnnnnnnnnnnnnnnnnnnnnnnnnnnnnnnnnnnnnnnnnnnnnnnnnnnnnnnnnnnnnnnnnnnnnnnnnnnnnnnnnnnnnnnnnnnnnnnnnnnnnnnnnnnnnnnnnnnnnnnnnnnnnnnnnnnnnnnnnnnnnnnnnnnnnnnnnnnnnnnnnnnnnnnnnnnnnnnnnnnnnnnnnnnnnnnnnnnnnnnnnnnnnnnnnnnnnnnnnnnnnnnnnnnnnnnnnnnnnnnnnnnnnnnnnnnnnnnnnnnnnnnnnnnnnnnnnnnnnnnnnnnnnnnnnnnnnnnnnnnnnnnnnnnnnnnnnnnnnnnnnnnnnnnnnnnnnnnnnnnnnnnnnnnnnnnnnnnnnnnnnnnnnnnnnnnnnnnnnnnnnnnnnnnnnnnnnnnnnnnnnnnnnnnnnnnnnnnnnnnnnnnnnnnnnnnnnnnnnnnnnnnnnnnnnnnnnnnnnnnnnnnnnnnnnnnnnnnnnnnnnnnnnnnnnnnnnnnnnnnnnnnnnnnnnnnnnnnnnnnnnnnnnnnnnnnnnnnnnnnnnnnnnnnnnnnnnnnnnnnnnnnnnnnnnnnnnnnnnnnnnnnnnnnnnnnnnnnnnnnnnnnnnnnnnnnnnnnnnnnnnnnnnnnnnnnnnnnnnnnnnnnnnnnnnnnnnnnnnnnnnnnnnnnnnnnnnnnnnnnnnnnnnnnnnnnnnnnnnnnnnnnnnnnnnnnnnnnnnnnnnnnnnnnnnnnnnnnnnnnnnnnnnnnnnnnnnnnnnnnnnnnnnnnnnnnnnnnnnnnnnnnnnnnnnnnnnnnnnnnnnnnnnnnnnnnnnnnnnnnnnnnnnnnnnnnnnnnnnnnnnnnnnnnnnnnnnnnnnnnnnnnnnnnnnnnnnnnnnnnnnnnnnnnnnnnnnnnnnnnnnnnnnnnnnnnnnnnnnnnnnnnnnnnnnnnnnnnnnnnnnnnnnnnnnnnnnnnnnnnnnnnnnnnnnnnnnnnnnnnnnnnnnnnnnnnnnnnnnnnnnnnnnnnnnnnnnnnnnnnnnnnnnnnnnnnnnnnnnnnnnnnnnnnnnnnnnnnnnnnnnnnnnnnnnnnnnnnnnnnnnnnnnnnnnnnnnnnnnnnnnnnnnnnnnnnnnnnnnnnnnnnnnnnnnnnnnnnnnnnnnnnnnnnnnnnnnnnnnnnnnnnnnnnnnnnnnnnnnnnnnnnnnnnnnnnnnnnnnnnnnnnnnnnnnnnnnnnnnnnnnnnnnnnnnnnnnnnnnnnnnnnnnnnnnnnnnnnnnnnnnnnnnnnnnnnnnnnnnnnnnnnnnnnnnnnnnnnnnnnnnnnnnnnnnnnnnnnnnnnnnnnnnnnnnnnnnnnnnnnnnnnnnnnnnnnnnnnnnnnnnnnnnnnnnnnnnnnnnnnnnnnnnnnnnnnnnnnnnnnnnnnnnnnnnnnnnnnnnnnnnnnnnnnnnnnnnnnnnnnnnnnnnnnnnnnnnnnnnnnnnnnnnnnnnnnnnnnnnnnnnnnnnnnnnnnnnnnnnnnnnnnnnnnnnnnnnnnnnnnnnnnnnnnnnnnnnnnnnnnnnnnnnnnnnnnnnnnnnnnnnnnnnnnnnnnnnnnnnnnnnnnnnnnnnnnnnnnnnnnnnnnnnnnnnnnnnnnnnnnnnnnnnnnnnnnnnnnnnnnnnnnnnnnnnnnnnnnnnnnnnnnnnnnnnnnnnnnnnnnnnnnnnnnnnnnnnnnnnnnnnnnnnnnnnnnnnnnnnnnnnnnnnnnnnnnnnnnnnnnnnnnnnnnnnnnnnnnnnnnnnnnnnnnnnnnnnnnnnnnnnnnnnnnnnnnnnnnnnnnnnnnnnnnnnnnnnnnnnnnnnnnnnnnnnnnnnnnnnnnnnnnnnnnnnnnnnnnnnnnnnnnnnnnnnnnnnnnnnnnnnnnnnnnnnnnnnnnnnnnnnnnnnnnnnnnnnnnnnnnnnnnnnnnnnnnnnnnnnnnnnnnnnnnnnnnnnnnnnnnnnnnnnnnnnnnnnnnnnnnnnnnnnnnnnnnnnnnnnnnnnnnnnnnnnnnnnnnnnnnnnnnnnnnnnnnnnnnnnnnnnnnnnnnnnnnnnnnnnnnnnnnnnnnnnnnnnnnnnnnnnnnnnnnnnnnnnnnnnnnnnnnnnnnnnnnnnnnnnnnnnnnnnnnnnnnnnnnnnnnnnnnnnnnnnnnnnnnnnnnnnnnnnnnnnnnnnnnnnnnnnnnnnnnnnnnnnnnnnnnnnnnnnnnnnnnnnnnnnnnnnnnnnnnnnnnnnnnnnnnnnnnnnnnnnnnnnnnnnnnnnnnnnnnnnnnnnnnnnnnnnnnnnnnnnnnnnnnnnnnnnnnnnnnnnnnnnnnnnnnnnnnnnnnnnnnnnnnnnnnnnnnnnnnnnnnnnnnnnnnnnnnnnnnnnnnnnnnnnnnnnnnnnnnnnnnnnnnnnnnnnnnnnnnnnnnnnnnnnnnnnnnnnnnnnnnnnnnnnnnnnnnnnnnnnnnnnnnnnnnnnnnnnnnnnnnnnnnnnnnnnnnnnnnnnnnnnnnnnnnnnnnnnnnnnnnnnnnnnnnnnnnnnnnnnnnnnnnnnnnnnnnnnnnnnnnnnnnnnnnnnnnnnnnnnnnnnnnnnnnnnnnnnnnnnnnnnnnnnnnnnnnnnnnnnnnnnnnnnnnnnnnnnnnnnnnnnnnnnnnnnnnnnnnnnnnnnnnnnnnnnnnnnnnnnnnnnnnnnnnnnnnnnnnnnnnnnnnnnnnnnnnnnnnnnnnnnnnnnnnnnnnnnnnnnnnnnnnnnnnnnnnnnnnnnnnnnnnnnnnnnnnnnnnnnnnnnnnnnnnnnnnnnnnnnnnnnnnnnnnnnnnnnnnnnnnnnnnnnnnnnnnnnnnnnnnnnnnnnnnnnnnnnnnnnnnnnnnnnnnnnnnnnnnnnnnnnnnnnnnnnnnnnnnnnnnnnnnnnnnnnnnnnnnnnnnnnnnnnnnnnnnnnnnnnnnnnnnnnnnnnnnnnnnnnnnnnnnnnnnnnnnnnnnnnnnnnnnnnnnnnnnnnnnnnnnnnnnnnnnnnnnnnnnnnnnnnnnnnnnnnnnnnnnnnnnnnnnnnnnnnnnnnnnnnnnnnnnnnnnnnnnnnnnnnnnnnnnnnnnnnnnnnnnnnnnnnnnnnnnnnnnnnnnnnnnnnnnnnnnnnnnnnnnnnnnnnnnnnnnnnnnnnnnnnnnnnnnnnnnnnnnnnnnnnnnnnnnnnnnnnnnnnnnnnnnnnnnnnnnnnnnnnnnnnnnnnnnnnnnnnnnnnnnnnnnnnnnnnnnnnnnnnnnnnnnnnnnnnnnnnnnnnnnnnnnnnnnnnnnnnnnnnnnnnnnnnnnnnnnnnnnnnnnnnnnnnnnnnnnnnnnnnnnnnnnnnnnnnnnnnnnnnnnnnnnnnnnnnnnnnnnnnnnnnnnnnnnnnnnnnnnnnnnnnnnnnnnnnnnnnnnnnnnnnnnnnnnnnnnnnnnnnnnnnnnnnnnnnnnnnnnnnnnnnnnnnnnnnnnnnnnnnnnnnnnnnnnnnnnnnnnnnnnnnnnnnnnnnnnnnnnnnnnnnnnnnnnnnnnnnnnnnnnnnnnnnnnnnnnnnnnnnnnnnnnnnnnnnnnnnnnnnnnnnnnnnnnnnnnnnnnnnnnnnnnnnnnnnnnnnnnnnnnnnnnnnnnnnnnnnnnnnnnnnnnnnnnnnnnnnnnnnnnnnnnnnnnnnnnnnnnnnnnnnnnnnnnnnnnnnnnnnnnnnnnnnnnnnnnnnnnnnnnnnnnnnnnnnnnnnnnnnnnnnnnnnnnnnnnnnnnnnnnnnnnnnnnnnnnnnnnnnnnnnnnnnnnnnnnnnnnnnnnnnnnnnnnnnnnnnnnnnnnnnnnnnnnnnnnnnnnnnnnnnnnnnnnnnnnnnnnnnnnnnnnnnnnnnnnnnnnnnnnnnnnnnnnnnnnnnnnnnnnnnnnnnnnnnnnnnnnnnnnnnnnnnnnnnnnnnnnnnnnnnnnnnnnnnnnnnnnnnnnnnnnnnnnnnnnnnnnnnnnnnnnnnnnnnnnnnnnnnnnnnnnnnnnnnnnnnnnnnnnnnnnnnnnnnnnnnnnnnnnnnnnnnnnnnnnnnnnnnnnnnnnnnnnnnnnnnnnnnnnnnnnnnnnnnnnnnnnnnnnnnnnnnnnnnnnnnnnnnnnnnnnnnnnnnnnnnnnnnnnnnnnnnnnnnnnnnnnnnnnnnnnnnnnnnnnnnnnnnnnnnnnnnnnnnnnnnnnnnnnnnnnnnnnnnnnnnnnnnnnnnnnnnnnnnnnnnnnnnnnnnnnnnnnnnnnnnnnnnnnnnnnnnnnnnnnnnnnnnnnnnnnnnnnnnnnnnnnnnnnnnnnnnnnnnnnnnnnnnnnnnnnnnnnnnnnnnnnnnnnnnnnnnnnnnnnnnnnnnnnnnnnnnnnnnnnnnnnnnnnnnnnnnnnnnnnnnnnnnnnnnnnnnnnnnnnnnnnnnnnnnnnnnnnnnnnnnnnnnnnnnnnnnnnnnnnnnnnnnnnnnnnnnnnnnnnnnnnnnnnnnnnnnnnnnnnnnnnnnnnnnnnnnnnnnnnnnnnnnnnnnnnnnnnnnnnnnnnnnnnnnnnnnnnnnnnnnnnnnnnnnnnnnnnnnnnnnnnnnnnnnnnnnnnnnnnnnnnnnnnnnnnnnnnnnnnnnnnnnnnnnnnnnnnnnnnnnnnnnnnnnnnnnnnnnnnnnnnnnnnnnnnnnnnnnnnnnnnnnnnnnnnnnnnnnnnnnnnnnnnnnnnnnnnnnnnnnnnnnnnnnnnnnnnnnnnnnnnnnnnnnnnnnnnnnnnnnnnnnnnnnnnnnnnnnnnnnnnnnnnnnnnnnnnnnnnnnnnnnnnnnnnnnnnnnnnnnnnnnnnnnnnnnnnnnnnnnnnnnnnnnnnnnnnnnnnnnnnnnnnnnnnnnnnnnnnnnnnnnnnnnnnnnnnnnnnnnnnnnnnnnnnnnnnnnnnnnnnnnnnnnnnnnnnnnnnnnnnnnnnnnnnnnnnnnnnnnnnnnnnnnnnnnnnnnnnnnnnnnnnnnnnnnnnnnnnnnnnnnnnnnnnnnnnnnnnnnnnnnnnnnnnnnnnnnnnnnnnnnnnnnnnnnnnnnnnnnnnnnnnnnnnnnnnnnnnnnnnnnnnnnnnnnnnnnnnnnnnnnnnnnnnnnnnnnnnnnnnnnnnnnnnnnnnnnnnnnnnnnnnnnnnnnnnnnnnnnnnnnnnnnnnnnnnnnnnnnnnnnnnnnnnnnnnnnnnnnnnnnnnnnnnnnnnnnnnnnnnnnnnnnnnnnnnnnnnnnnnnnnnnnnnnnnnnnnnnnnnnnnnnnnnnnnnnnnnnnnnnnnnnnnnnnnnnnnnnnnnnnnnnnnnnnnnnnnnnnnnnnnnnnnnnnnnnnnnnnnnnnnnnnnnnnnnnnnnnnnnnnnnnnnnnnnnnnnnnnnnnnnnnnnnnnnnnnnnnnnnnnnnnnnnnnnnnnnnnnnnnnnnnnnnnnnnnnnnnnnnnnnnnnnnnnnnnnnnnnnnnnnnnnnnnnnnnnnnnnnnnnnnnnnnnnnnnnnnnnnnnnnnnnnnnnnnnnnnnnnnnnnnnnnnnnnnnnnnnnnnnnnnnnnnnnnnnnnnnnnnnnnnnnnnnnnnnnnnnnnnnnnnnnnnnnnnnnnnnnnnnnnnnnnnnnnnnnnnnnnnnnnnnnnnnnnnnnnnnnnnnnnnnnnnnnnnnnnnnnnnnnnnnnnnnnnnnnnnnnnnnnnnnnnnnnnnnnnnnnnnnnnnnnnnnnnnnnnnnnnnnnnnnnnnnnnnnnnnnnnnnnnnnnnnnnnnnnnnnnnnnnnnnnnnnnnnnnnnnnnnnnnnnnnnnnnnnnnnnnnnnnnnnnnnnnnnnnnnnnnnnnnnnnnnnnnnnnnnnnnnnnnnnnnnnnnnnnnnnnnnnnnnnnnnnnnnnnnnnnnnnnnnnnnnnnnnnnnnnnnnnnnnnnnnnnnnnnnnnnnnnnnnnnnnnnnnnnnnnnnnnnnnnnnnnnnnnnnnnnnnnnnnnnnnnnnnnnnnnnnnnnnnnnnnnnnnnnnnnnnnnnnnnnnnnnnnnnnnnnnnnnnnnnnnnnnnnnnnnnnnnnnnnnnnnnnnnnnnnnnnnnnnnnnnnnnnnnnnnnnnnnnnnnnnnnnnnnnnnnnnnnnnnnnnnnnnnnnnnnnnnnnnnnnnnnnnnnnnnnnnnnnnnnnnnnnnnnnnnnnnnnnnnnnnnnnnnnnnnnnnnnnnnnnnnnnnnnnnnnnnnnnnnnnnnnnnnnnnnnnnnnnnnnnnnnnnnnnnnnnnnnnnnnnnnnnnnnnnnnnnnnnnnnnnnnnnnnnnnnnnnnnnnnnnnnnnnnnnnnnnnnnnnnnnnnnnnnnnnnnnnnnnnnnnnnnnnnnnnnnnnnnnnnnnnnnnnnnnnnnnnnnnnnnnnnnnnnnnnnnnnnnnnnnnnnnnnnnnnnnnnnnnnnnnnnnnnnnnnnnnnnnnnnnnnnnnnnnnnnnnnnnnnnnnnnnnnnnnnnnnnnnnnnnnnnnnnnnnnnnnnnnnnnnnnnnnnnnnnnnnnnnnnnnnnnnnnnnnnnnnnnnnnnnnnnnnnnnnnnnnnnnnnnnnnnnnnnnnnnnnnnnnnnnnnnnnnnnnnnnnnnnnnnnnnnnnnnnnnnnnnnnnnnnnnnnnnnnnnnnnnnnnnnnnnnnnnnnnnnnnnnnnnnnnnnnnnnnnnnnnnnnnnnnnnnnnnnnnnnnnnnnnnnnnnnnnnnnnnnnnnnnnnnnnnnnnnnnnnnnnnnnnnnnnnnnnnnnnnnnnnnnnnnnnnnnnnnnnnnnnnnnnnnnnnnnnnnnnnnnnnnnnnnnnnnnnnnnnnnnnnnnnnnnnnnnnnnnnnnnnnnnnnnnnnnnnnnnnnnnnnnnnnnnnnnnnnnnnnnnnnnnnnnnnnnnnnnnnnnnnnnnnnnnnnnnnnnnnnnnnnnnnnnnnnnnnnnnnnnnnnnnnnnnnnnnnnnnnnnnnnnnnnnnnnnnnnnnnnnnnnnnnnnnnnnnnnnnnnnnnnnnnnnnnnnnnnnnnnnnnnnnnnnnnnnnnnnnnnnnnnnnnnnnnnnnnnnnnnnnnnnnnnnnnnnnnnnnnnnnnnnnnnnnnnnnnnnnnnnnnnnnnnnnnnnnnnnnnnnnnnnnnnnnnnnnnnnnnnnnnnnnnnnnnnnnnnnnnnnnnnnnnnnnnnnnnnnnnnnnnnnnnnnnnnnnnnnnnnnnnnnnnnnnnnnnnnnnnnnnnnnnnnnnnnnnnnnnnnnnnnnnnnnnnnnnnnnnnnnnnnnnnnnnnnnnnnnnnnnnnnnnnnnnnnnnnnnnnnnnnnnnnnnnnnnnnnnnnnnnnnnnnnnnnnnnnnnnnnnnnnnnnnnnnnnnnnnnnnnnnnnnnnnnnnnnnnnnnnnnnnnnnnnnnnnnnnnnnnnnnnnnnnnnnnnnnnnnnnnnnnnnnnnnnnnnnnnnnnnnnnnnnnnnnnnnnnnnnnnnnnnnnnnnnnnnnnnnnnnnnnnnnnnnnnnnnnnnnnnnnnnnnnnnnnnnnnnnnnnnnnnnnnnnnnnnnnnnnnnnnnnnnnnnnnnnnnnnnnnnnnnnnnnnnnnnnnnnnnnnnnnnnnnnnnnnnnnnnnnnnnnnnnnnnnnnnnnnnnnnnnnnnnnnnnnnnnnnnnnnnnnnnnnnnnnnnnnnnnnnnnnnnnnnnnnnnnnnnnnnnnnnnnnnnnnnnnnnnnnnnnnnnnnnnnnnnnnnnnnnnnnnnnnnnnnnnnnnnnnnnnnnnnnnnnnnnnnnnnnnnnnnnnnnnnnnnnnnnnnnnnnnnnnnnnnnnnnnnnnnnnnnnnnnnnnnnnnnnnnnnnnnnnnnnnnnnnnnnnnnnnnnnnnnnnnnnnnnnnnnnnnnnnnnnnnnnnnnnnnnnnnnnnnnnnnnnnnnnnnnnnnnnnnnnnnnnnnnnnnnnnnnnnnnnnnnnnnnnnnnnnnnnnnnnnnnnnnnnnnnnnnnnnnnnnnnnnnnnnnnnnnnnnnnnnnnnnnnnnnnnnnnnnnnnnnnnnnnnnnnnnnnnnnnnnnnnnnnnnnnnnnnnnnnnnnnnnnnnnnnnnnnnnnnnnnnnnnnnnnnnnnnnnnnnnnnnnnnnnnnnnnnnnnnnnnnnnnnnnnnnnnnnnnnnnnnnnnnnnnnnnnnnnnnnnnnnnnnnnnnnnnnnnnnnnnnnnnnnnnnnnnnnnnnnnnnnnnnnnnnnnnnnnnnnnnnnnnnnnnnnnnnnnnnnnnnnnnnnnnnnnnnnnnnnnnnnnnnnnnnnnnnnnnnnnnnnnnnnnnnnnnnnnnnnnnnnnnnnnnnnnnnnnnnnnnnnnnnnnnnnnnnnnnnnnnnnnnnnnnnnnnnnnnnnnnnnnnnnnnnnnnnnnnnnnnnnnnnnnnnnnnnnnnnnnnnnnnnnnnnnnnnnnnnnnnnnnnnnnnnnnnnnnnnnnnnnnnnnnnnnnnnnnnnnnnnnnnnnnnnnnnnnnnnnnnnnnnnnnnnnnnnnnnnnnnnnnnnnnnnnnnnnnnnnnnnnnnnnnnnnnnnnnnnnnnnnnnnnnnnnnnnnnnnnnnnnnnnnnnnnnnnnnnnnnnnnnnnnnnnnnnnnnnnnnnnnnnnnnnnnnnnnnnnnnnnnnnnnnnnnnnnnnnnnnnnnnnnnnnnnnnnnnnnnnnnnnnnnnnnnnnnnnnnnnnnnnnnnnnnnnnnnnnnnnnnnnnnnnnnnnnnnnnnnnnnnnnnnnnnnnnnnnnnnnnnnnnnnnnnnnnnnnnnnnnnnnnnnnnnnnnnnnnnnnnnnnnnnnnnnnnnnnnnnnnnnnnnnnnnnnnnnnnnnnnnnnnnnnnnnnnnnnnnnnnnnnnnnnnnnnnnnnnnnnnnnnnnnnnnnnnnnnnnnnnnnnnnnnnnnnnnnnnnnnnnnnnnnnnnnnnnnnnnnnnnnnnnnnnnnnnnnnnnnnnnnnnnnnnnnnnnnnnnnnnnnnnnnnnnnnnnnnnnnnnnnnnnnnnnnnnnnnnnnnnnnnnnnnnnnnnnnnnnnnnnnnnnnnnnnnnnnnnnnnnnnnnnnnnnnnnnnnnnnnnnnnnnnnnnnnnnnnnnnnnnnnnnnnnnnnnnnnnnnnnnnnnnnnnnnnnnnnnnnnnnnnnnnnnnnnnnnnnnnnnnnnnnnnnnnnnnnnnnnnnnnnnnnnnnnnnnnnnnnnnnnnnnnnnnnnnnnnnnnnnnnnnnnnnnnnnnnnnnnnnnnnnnnnnnnnnnnnnnnnnnnnnnnnnnnnnnnnnnnnnnnnnnnnnnnnnnnnnnnnnnnnnnnnnnnnnnnnnnnnnnnnnnnnnnnnnnnnnnnnnnnnnnnnnnnnnnnnnnnnnnnnnnnnnnnnnnnnnnnnnnnnnnnnnnnnnnnnnnnnnnnnnnnnnnnnnnnnnnnnnnnnnnnnnnnnnnnnnnnnnnnnnnnnnnnnnnnnnnnnnnnnnnnnnnnnnnnnnnnnnnnnnnnnnnnnnnnnnnnnnnnnnnnnnnnnnnnnnnnnnnnnnnnnnnnnnnnnnnnnnnnnnnnnnnnnnnnnnnnnnnnnnnnnnnnnnnnnnnnnnnnnnnnnnnnnnnnnnnnnnnnnnnnnnnnnnnnnnnnnnnnnnnnnnnnnnnnnnnnnnnnnnnnnnnnnnnnnnnnnnnnnnnnnnnnnnnnnnnnnnnnnnnnnnnnnnnnnnnnnnnnnnnnnnnnnnnnnnnnnnnnnnnnnnnnnnnnnnnnnnnnnnnnnnnnnnnnnnnnnnnnnnnnnnnnnnnnnnnnnnnnnnnnnnnnnnnnnnnnnnnnnnnnnnnnnnnnnnnnnnnnnnnnnnnnnnnnnnnnnnnnnnnnnnnnnnnnnnnnnnnnnnnnnnnnnnnnnnnnnnnnnnnnnnnnnnnnnnnnnnnnnnnnnnnnnnnnnnnnnnnnnnnnnnnnnnnnnnnnnnnnnnnnnnnnnnnnnnnnnnnnnnnnnnnnnnnnnnnnnnnnnnnnnnnnnnnnnnnnnnnnnnnnnnnnnnnnnnnnnnnnnnnnnnnnnnnnnnnnnnnnnnnnnnnnnnnnnnnnnnnnnnnnnnnnnnnnnnnnnnnnnnnnnnnnnnnnnnnnnnnnnnnnnnnnnnnnnnnnnnnnnnnnnnnnnnnnnnnnnnnnnnnnnnnnnnnnnnnnnnnnnnnnnnnnnnnnnnnnnnnnnnnnnnnnnnnnnnnnnnnnnnnnnnnnnnnnnnnnnnnnnnnnnnnnnnnnnnnnnnnnnnnnnnnnnnnnnnnnnnnnnnnnnnnnnnnnnnnnnnnnnnnnnnnnnnnnnnnnnnnnnnnnnnnnnnnnnnnnnnnnnnnnnnnnnnnnnnnnnnnnnnnnnnnnnnnnnnnnnnnnnnnnnnnnnnnnnnnnnnnnnnnnnnnnnnnnnnnnnnnnnnnnnnnnnnnnnnnnnnnnnnnnnnnnnnnnnnnnnnnnnnnnnnnnnnnnnnnnnnnnnnnnnnnnnnnnnnnnnnnnnnnnnnnnnnnnnnnnnnnnnnnnnnnnnnnnnnnnnnnnnnnnnnnnnnnnnnnnnnnnnnnnnnnnnnnnnnnnnnnnnnnnnnnnnnnnnnnnnnnnnnnnnnnnnnnnnnnnnnnnnnnnnnnnnnnnnnnnnnnnnnnnnnnnnnnnnnnnnnnnnnnnnnnnnnnnnnnnnnnnnnnnnnnnnnnnnnnnnnnnnnnnnnnnnnnnnnnnnnnnnnnnnnnnnnnnnnnnnnnnnnnnnnnnnnnnnnnnnnnnnnnnnnnnnnnnnnnnnnnnnnnnnnnnnnnnnnnnnnnnnnnnnnnnnnnnnnnnnnnnnnnnnnnnnnnnnnnnnnnnnnnnnnnnnnnnnnnnnnnnnnnnnnnnnnnnnnnnnnnnnnnnnnnnnnnnnnnnnnnnnnnnnnnnnnnnnnnnnnnnnnnnnnnnnnnnnnnnnnnnnnnnnnnnnnnnnnnnnnnnnnnnnnnnnnnnnnnnnnnnnnnnnnnnnnnnnnnnnnnnnnnnnnnnnnnnnnnnnnnnnnnnnnnnnnnnnnnnnnnnnnnnnnnnnnnnnnnnnnnnnnnnnnnnnnnnnnnnnnnnnnnnnnnnnnnnnnnnnnnnnnnnnnnnnnnnnnnnnnnnnnnnnnnnnnnnnnnnnnnnnnnnnnnnnnnnnnnnnnnnnnnnnnnnnnnnnnnnnnnnnnnnnnnnnnnnnnnnnnnnnnnnnnnnnnnnnnnnnnnnnnnnnnnnnnnnnnnnnnnnnnnnnnnnnnnnnnnnnnnnnnnnnnnnnnnnnnnnnnnnnnnnnnnnnnnnnnnnnnnnnnnnnnnnnnnnnnnnnnnnnnnnnnnnnnnnnnnnnnnnnnnnnnnnnnnnnnnnnnnnnnnnnnnnnnnnnnnnnnnnnnnnnnnnnnnnnnnnnnnnnnnnnnnnnnnnnnnnnnnnnnnnnnnnnnnnnnnnnnnnnnnnnnnnnnnnnnnnnnnnnnnnnnnnnnnnnnnnnnnnnnnnnnnnnnnnnnnnnnnnnnnnnnnnnnnnnnnnnnnnnnnnnnnnnnnnnnnnnnnnnnnnnnnnnnnnnnnnnnnnnnnnnnnnnnnnnnnnnnnnnnnnnnnnnnnnnnnnnnnnnnnnnnnnnnnnnnnnnnnnnnnnnnnnnnnnnnnnnnnnnnnnnnnnnnnnnnnnnnnnnnnnnnnnnnnnnnnnnnnnnnnnnnnnnnnnnnnnnnnnnnnnnnnnnnnnnnnnnnnnnnnnnnnnnnnnnnnnnnnnnnnnnnnnnnnnnnnnnnnnnnnnnnnnnnnnnnnnnnnnnnnnnnnnnnnnnnnnnnnnnnnnnnnnnnnnnnnnnnnnnnnnnnnnnnnnnnnnnnnnnnnnnnnnnnnnnnnnnnnnnnnnnnnnnnnnnnnnnnnnnnnnnnnnnnnnnnnnnnnnnnnnnnnnnnnnnnnnnnnnnnnnnnnnnnnnnnnnnnnnnnnnnnnnnnnnnnnnnnnnnnnnnnnnnnnnnnnnnnnnnnnnnnnnnnnnnnnnnnnnnnnnnnnnnnnnnnnnnnnnnnnnnnnnnnnnnnnnnnnnnnnnnnnnnnnnnnnnnnnnnnnnnnnnnnnnnnnnnnnnnnnnnnnnnnnnnnnnnnnnnnnnnnnnnnnnnnnnnnnnnnnnnnnnnnnnnnnnnnnnnnnnnnnnnnnnnnnnnnnnnnnnnnnnnnnnnnnnnnnnnnnnnnnnnnnnnnnnnnnnnnnnnnnnnnnnnnnnnnnnnnnnnnnnnnnnnnnnnnnnnnnnnnnnnnnnnnnnnnnnnnnnnnnnnnnnnnnnnnnnnnnnnnnnnnnnnnnnnnnnnnnnnnnnnnnnnnnnnnnnnnnnnnnnnnnnnnnnnnnnnnnnnnnnnnnnnnnnnnnnnnnnnnnnnnnnnnnnnnnnnnnnnnnnnnnnnnnnnnnnnnnnnnnnnnnnnnnnnnnnnnnnnnnnnnnnnnnnnnnnnnnnnnnnnnnnnnnnnnnnnnnnnnnnnnnnnnnnnnnnnnnnnnnnnnnnnnnnnnnnnnnnnnnnnnnnnnnnnnnnnnnnnnnnnnnnnnnnnnnnnnnnnnnnnnnnnnnnnnnnnnnnnnnnnnnnnnnnnnnnnnnnnnnnnnnnnnnnnnnnnnnnnnnnnnnnnnnnnnnnnnnnnnnnnnnnnnnnnnnnnnnnnnnnnnnnnnnnnnnnnnnnnnnnnnnnnnnnnnnnnnnnnnnnnnnnnnnnnnnnnnnnnnnnnnnnnnnnnnnnnnnnnnnnnnnnnnnnnnnnnnnnnnnnnnnnnnnnnnnnnnnnnnnnnnnnnnnnnnnnnnnnnnnnnnnnnnnnnnnnnnnnnnnnnnnnnnnnnnnnnnnnnnnnnnnnnnnnnnnnnnnnnnnnnnnnnnnnnnnnnnnnnnnnnnnnnnnnnnnnnnnnnnnnnnnnnnnnnnnnnnnnnnnnnnnnnnnnnnnnnnnnnnnnnnnnnnnnnnnnnnnnnnnnnnnnnnnnnnnnnnnnnnnnnnnnnnnnnnnnnnnnnnnnnnnnnnnnnnnnnnnnnnnnnnnnnnnnnnnnnnnnnnnnnnnnnnnnnnnnnnnnnnnnnnnnnnnnnnnnnnnnnnnnnnnnnnnnnnnnnnnnnnnnnnnnnnnnnnnnnnnnnnnnnnnnnnnnnnnnnnnnnnnnnnnnnnnnnnnnnnnnnnnnnnnnnnnnnnnnnnnnnnnnnnnnnnnnnnnnnnnnnnnnnnnnnnnnnnnnnnnnnnnnnnnnnnnnnnnnnnnnnnnnnnnnnnnnnnnnnnnnnnnnnnnnnnnnnnnnnnnnnnnnnnnnnnnnnnnnnnnnnnnnnnnnnnnnnnnnnnnnnnnnnnnnnnnnnnnnnnnnnnnnnnnnnnnnnnnnnnnnnnnnnnnnnnnnnnnnnnnnnnnnnnnnnnnnnnnnnnnnnnnnnnnnnnnnnnnnnnnnnnnnnnnnnnnnnnnnnnnnnnnnnnnnnnnnnnnnnnnnnnnnnnnnnnnnnnnnnnnnnnnnnnnnnnnnnnnnnnnnnnnnnnnnnnnnnnnnnnnnnnnnnnnnnnnnnnnnnnnnnnnnnnnnnnnnnnnnnnnnnnnnnnnnnnnnnnnnnnnnnnnnnnnnnnnnnnnnnnnnnnnnnnnnnnnnnnnnnnnnnnnnnnnnnnnnnnnnnnnnnnnnnnnnnnnnnnnnnnnnnnnnnnnnnnnnnnnnnnnnnnnnnnnnnnnnnnnnnnnnnnnnnnnnnnnnnnnnnnnnnnnnnnnnnnnnnnnnnnnnnnnnnnnnnnnnnnnnnnnnnnnnnnnnnnnnnnnnnnnnnnnnnnnnnnnnnnnnnnnnnnnnnnnnnnnnnnnnnnnnnnnnnnnnnnnnnnnnnnnnnnnnnnnnnnnnnnnnnnnnnnnnnnnnnnnnnnnnnnnnnnnnnnnnnnnnnnnnnnnnnnnnnnnnnnnnnnnnnnnnnnnnnnnnnnnnnnnnnnnnnnnnnnnnnnnnnnnnnnnnnnnnnnnnnnnnnnnnnnnnnnnnnnnnnnnnnnnnnnnnnnnnnnnnnnnnnnnnnnnnnnnnnnnnnnnnnnnnnnnnnnnnnnnnnnnnnnnnnnnnnnnnnnnnnnnnnnnnnnnnnnnnnnnnnnnnnnnnnnnnnnnnnnnnnnnnnnnnnnnnnnnnnnnnnnnnnnnnnnnnnnnnnnnnnnnnnnnnnnnnnnnnnnnnnnnnnnnnnnnnnnnnnnnnnnnnnnnnnnnnnnnnnnnnnnnnnnnnnnnnnnnnnnnnnnnnnnnnnnnnnnnnnnnnnnnnnnnnnnnnnnnnnnnnnnnnnnnnnnnnnnnnnnnnnnnnnnnnnnnnnnnnnnnnnnnnnnnnnnnnnnnnnnnnnnnnnnnnnnnnnnnnnnnnnnnnnnnnnnnnnnnnnnnnnnnnnnnnnnnnnnnnnnnnnnnnnnnnnnnnnnnnnnnnnnnnnnnnnnnnnnnnnnnnnnnnnnnnnnnnnnnnnnnnnnnnnnnnnnnnnnnnnnnnnnnnnnnnnnnnnnnnnnnnnnnnnnnnnnnnnnnnnnnnnnnnnnnnnnnnnnnnnnnnnnnnnnnnnnnnnnnnnnnnnnnnnnnnnnnnnnnnnnnnnnnnnnnnnnnnnnnnnnnnnnnnnnnnnnnnnnnnnnnnnnnnnnnnnnnnnnnnnnnnnnnnnnnnnnnnnnnnnnnnnnnnnnnnnnnnnnnnnnnnnnnnnnnnnnnnnnnnnnnnnnnnnnnnnnnnnnnnnnnnnnnnnnnnnnnnnnnnnnnnnnnnnnnnnnnnnnnnnnnnnnnnnnnnnnnnnnnnnnnnnnnnnnnnnnnnnnnnnnnnnnnnnnnnnnnnnnnnnnnnnnnnnnnnnnnnnnnnnnnnnnnnnnnnnnnnnnnnnnnnnnnnnnnnnnnnnnnnnnnnnnnnnnnnnnnnnnnnnnnnnnnnnnnnnnnnnnnnnnnnnnnnnnnnnnnnnnnnnnnnnnnnnnnnnnnnnnnnnnnnnnnnnnnnnnnnnnnnnnnnnnnnnnnnnnnnnnnnnnnnnnnnnnnnnnnnnnnnnnnnnnnnnnnnnnnnnnnnnnnnnnnnnnnnnnnnnnnnnnnnnnnnnnnnnnnnnnnnnnnnnnnnnnnnnnnnnnnnnnnnnnnnnnnnnnnnnnnnnnnnnnnnnnnnnnnnnnnnnnnnnnnnnnnnnnnnnnnnnnnnnnnnnnnnnnnnnnnnnnnnnnnnnnnnnnnnnnnnnnnnnnnnnnnnnnnnnnnnnnnnnnnnnnnnnnnnnnnnnnnnnnnnnnnnnnnnnnnnnnnnnnnnnnnnnnnnnnnnnnnnnnnnnnnnnnnnnnnnnnnnnnnnnnnnnnnnnnnnnnnnnnnnnnnnnnnnnnnnnnnnnnnnnnnnnnnnnnnnnnnnnnnnnnnnnnnnnnnnnnnnnnnnnnnnnnnnnnnnnnnnnnnnnnnnnnnnnnnnnnnnnnnnnnnnnnnnnnnnnnnnnnnnnnnnnnnnnnnnnnnnnnnnnnnnnnnnnnnnnnnnnnnnnnnnnnnnnnnnnnnnnnnnnnnnnnnnnnnnnnnnnnnnnnnnnnnnnnnnnnnnnnnnnnnnnnnnnnnnnnnnnnnnnnnnnnnnnnnnnnnnnnnnnnnnnnnnnnnnnnnnnnnnnnnnnnnnnnnnnnnnnnnnnnnnnnnnnnnnnnnnnnnnnnnnnnnnnnnnnnnnnnnnnnnnnnnnnnnnnnnnnnnnnnnnnnnnnnnnnnnnnnnnnnnnnnnnnnnnnnnnnnnnnnnnnnnnnnnnnnnnnnnnnnnnnnnnnnnnnnnnnnnnnnnnnnnnnnnnnnnnnnnnnnnnnnnnnnnnnnnnnnnnnnnnnnnnnnnnnnnnnnnnnnnnnnnnnnnnnnnnnnnnnnnnnnnnnnnnnnnnnnnnnnnnnnnnnnnnnnnnnnnnnnnnnnnnnnnnnnnnnnnnnnnnnnnnnnnnnnnnnnnnnnnnnnnnnnnnnnnnnnnnnnnnnnnnnnnnnnnnnnnnnnnnnnnnnnnnnnnnnnnnnnnnnnnnnnnnnnnnnnnnnnnnnnnnnnnnnnnnnnnnnnnnnnnnnnnnnnnnnnnnnnnnnnnnnnnnnnnnnnnnnnnnnnnnnnnnnnnnnnnnnnnnnnnnnnnnnnnnnnnnnnnnnnnnnnnnnnnnnnnnnnnnnnnnnnnnnnnnnnnnnnnnnnnnnnnnnnnnnnnnnnnnnnnnnnnnnnnnnnnnnnnnnnnnnnnnnnnnnnnnnnnnnnnnnnnnnnnnnnnnnnnnnnnnnnnnnnnnnnnnnnnnnnnnnnnnnnnnnnnnnnnnnnnnnnnnnnnnnnnnnnnnnnnnnnnnnnnnnnnnnnnnnnnnnnnnnnnnnnnnnnnnnnnnnnnnnnnnnnnnnnnnnnnnnnnnnnnnnnnnnnnnnnnnnnnnnnnnnnnnnnnnnnnnnnnnnnnnnnnnnnnnnnnnnnnnnnnnnnnnnnnnnnnnnnnnnnnnnnnnnnnnnnnnnnnnnnnnnnnnnnnnnnnnnnnnnnnnnnnnnnnnnnnnnnnnnnnnnnnnnnnnnnnnnnnnnnnnnnnnnnnnnnnnnnnnnnnnnnnnnnnnnnnnnnnnnnnnnnnnnnnnnnnnnnnnnnnnnnnnnnnnnnnnnnnnnnnnnnnnnnnnnnnnnnnnnnnnnnnnnnnnnnnnnnnnnnnnnnnnnnnnnnnnnnnnnnnnnnnnnnnnnnnnnnnnnnnnnnnnnnnnnnnnnnnnnnnnnnnnnnnnnnnnnnnnnnnnnnnnnnnnnnnnnnnnnnnnnnnnnnnnnnnnnnnnnnnnnnnnnnnnnnnnnnnnnnnnnnnnnnnnnnnnnnnnnnnnnnnnnnnnnnnnnnnnnnnnnnnnnnnnnnnnnnnnnnnnnnnnnnnnnnnnnnnnnnnnnnnnnnnnnnnnnnnnnnnnnnnnnnnnnnnnnnnnnnnnnnnnnnnnnnnnnnnnnnnnnnnnnnnnnnnnnnnnnnnnnnnnnnnnnnnnnnnnnnnnnnnnnnnnnnnnnnnnnnnnnnnnnnnnnnnnnnnnnnnnnnnnnnnnnnnnnnnnnnnnnnnnnnnnnnnnnnnnnnnnnnnnnnnnnnnnnnnnnnnnnnnnnnnnnnnnnnnnnnnnnnnnnnnnnnnnnnnnnnnnnnnnnnnnnnnnnnnnnnnnnnnnnnnnnnnnnnnnnnnnnnnnnnnnnnnnnnnnnnnnnnnnnnnnnnnnnnnnnnnnnnnnnnnnnnnnnnnnnnnnnnnnnnnnnnnnnnnnnnnnnnnnnnnnnnnnnnnnnnnnnnnnnnnnnnnnnnnnnnnnnnnnnnnnnnnnnnnnnnnnnnnnnnnnnnnnnnnnnnnnnnnnnnnnnnnnnnnnnnnnnnnnnnnnnnnnnnnnnnnnnnnnnnnnnnnnnnnnnnnnnnnnnnnnnnnnnnnnnnnnnnnnnnnnnnnnnnnnnnnnnnnnnnnnnnnnnnnnnnnnnnnnnnnnnnnnnnnnnnnnnnnnnnnnnnnnnnnnnnnnnnnnnnnnnnnnnnnnnnnnnnnnnnnnnnnnnnnnnnnnnnnnnnnnnnnnnnnnnnnnnnnnnnnnnnnnnnnnnnnnnnnnnnnnnnnnnnnnnnnnnnnnnnnnnnnnnnnnnnnnnnnnnnnnnnnnnnnnnnnnnnnnnnnnnnnnnnnnnnnnnnnnnnnnnnnnnnnnnnnnnnnnnnnnnnnnnnnnnnnnnnnnnnnnnnnnnnnnnnnnnnnnnnnnnnnnnnnnnnnnnnnnnnnnnnnnnnnnnnnnnnnnnnnnnnnnnnnnnnnnnnnnnnnnnnnnnnnnnnnnnnnnnnnnnnnnnnnnnnnnnnnnnnnnnnnnnnnnnnnnnnnnnnnnnnnnnnnnnnnnnnnnnnnnnnnnnnnnnnnnnnnnnnnnnnnnnnnnnnnnnnnnnnnnnnnnnnnnnnnnnnnnnnnnnnnnnnnnnnnnnnnnnnnnnnnnnnnnnnnnnnnnnnnnnnnnnnnnnnnnnnnnnnnnnnnnnnnnnnnnnnnnnnnnnnnnnnnnnnnnnnnnnnnnnnnnnnnnnnnnnnnnnnnnnnnnnnnnnnnnnnnnnnnnnnnnnnnnnnnnnnnnnnnnnnnnnnnnnnnnnnnnnnnnnnnnnnnnnnnnnnnnnnnnnnnnnnnnnnnnnnnnnnnnnnnnnnnnnnnnnnnnnnnnnnnnnnnnnnnnnnnnnnnnnnnnnnnnnnnnnnnnnnnnnnnnnnnnnnnnnnnnnnnnnnnnnnnnnnnnnnnnnnnnnnnnnnnnnnnnnnnnnnnnnnnnnnnnnnnnnnnnnnnnnnnnnnnnnnnnnnnnnnnnnnnnnnnnnnnnnnnnnnnnnnnnnnnnnnnnnnnnnnnnnnnnnnnnnnnnnnnnnnnnnnnnnnnnnnnnnnnnnnnnnnnnnnnnnnnnnnnnnnnnnnnnnnnnnnnnnnnnnnnnnnnnnnnnnnnnnnnnnnnnnnnnnnnnnnnnnnnnnnnnnnnnnnnnnnnnnnnnnnnnnnnnnnnnnnnnnnnnnnnnnnnnnnnnnnnnnnnnnnnnnnnnnnnnnnnnnnnnnnnnnnnnnnnnnnnnnnnnnnnnnnnnnnnnnnnnnnnnnnnnnnnnnnnnnnnnnnnnnnnnnnnnnnnnnnnnnnnnnnnnnnnnnnnnnnnnnnnnnnnnnnnnnnnnnnnnnnnnnnnnnnnnnnnnnnnnnnnnnnnnnnnnnnnnnnnnnnnnnnnnnnnnnnnnnnnnnnnnnnnnnnnnnnnnnnnnnnnnnnnnnnnnnnnnnnnnnnnnnnnnnnnnnnnnnnnnnnnnnnnnnnnnnnnnnnnnnnnnnnnnnnnnnnnnnnnnnnnnnnnnnnnnnnnnnnnnnnnnnnnnnnnnnnnnnnnnnnnnnnnnnnnnnnnnnnnnnnnnnnnnnnnnnnnnnnnnnnnnnnnnnnnnnnnnnnnnnnnnnnnnnnnnnnnnnnnnnnnnnnnnnnnnnnnnnnnnnnnnnnnnnnnnnnnnnnnnnnnnnnnnnnnnnnnnnnnnnnnnnnnnnnnnnnnnnnnnnnnnnnnnnnnnnnnnnnnnnnnnnnnnnnnnnnnnnnnnnnnnnnnnnnnnnnnnnnnnnnnnnnnnnnnnnnnnnnnnnnnnnnnnnnnnnnnnnnnnnnnnnnnnnnnnnnnnnnnnnnnnnnnnnnnnnnnnnnnnnnnnnnnnnnnnnnnnnnnnnnnnnnnnnnnnnnnnnnnnnnnnnnnnnnnnnnnnnnnnnnnnnnnnnnnnnnnnnnnnnnnnnnnnnnnnnnnnnnnnnnnnnnnnnnnnnnnnnnnnnnnnnnnnnnnnnnnnnnnnnnnnnnnnnnnnnnnnnnnnnnnnnnnnnnnnnnnnnnnnnnnnnnnnnnnnnnnnnnnnnnnnnnnnnnnnnnnnnnnnnnnnnnnnnnnnnnnnnnnnnnnnnnnnnnnnnnnnnnnnnnnnnnnnnnnnnnnnnnnnnnnnnnnnnnnnnnnnnnnnnnnnnnnnnnnnnnnnnnnnnnnnnnnnnnnnnnnnnnnnnnnnnnnnnnnnnnnnnnnnnnnnnnnnnnnnnnnnnnnnnnnnnnnnnnnnnnnnnnnnnnnnnnnnnnnnnnnnnnnnnnnnnnnnnnnnnnnnnnnnnnnnnnnnnnnnnnnnnnnnnnnnnnnnnnnnnnnnnnnnnnnnnnnnnnnnnnnnnnnnnnnnnnnnnnnnnnnnnnnnnnnnnnnnnnnnnnnnnnnnnnnnnnnnnnnnnnnnnnnnnnnnnnnnnnnnnnnnnnnnnnnnnnnnnnnnnnnnnnnnnnnnnnnnnnnnnnnnnnnnnnnnnnnnnnnnnnnnnnnnnnnnnnnnnnnnnnnnnnnnnnnnnnnnnnnnnnnnnnnnnnnnnnnnnnnnnnnnnnnnnnnnnnnnnnnnnnnnnnnnnnnnnnnnnnnnnnnnnnnnnnnnnnnnnnnnnnnnnnnnnnnnnnnnnnnnnnnnnnnnnnnnnnnnnnnnnnnnnnnnnnnnnnnnnnnnnnnnnnnnnnnnnnnnnnnnnnnnnnnnnnnnnnnnnnnnnnnnnnnnnnnnnnnnnnnnnnnnnnnnnnnnnnnnnnnnnnnnnnnnnnnnnnnnnnnnnnnnnnnnnnnnnnnnnnnnnnnnnnnnnnnnnnnnnnnnnnnnnnnnnnnnnnnnnnnnnnnnnnnnnnnnnnnnnnnnnnnnnnnnnnnnnnnnnnnnnnnnnnnnnnnnnnnnnnnnnnnnnnnnnnnnnnnnnnnnnnnnnnnnnnnnnnnnnnnnnnnnnnnnnnnnnnnnnnnnnnnnnnnnnnnnnnnnnnnnnnnnnnnnnnnnnnnnnnnnnnnnnnnnnnnnnnnnnnnnnnnnnnnnnnnnnnnnnnnnnnnnnnnnnnnnnnnnnnnnnnnnnnnnnnnnnnnnnnnnnnnnnnnnnnnnnnnnnnnnnnnnnnnnnnnnnnnnnnnnnnnnnnnnnnnnnnnnnnnnnnnnnnnnnnnnnnnnnnnnnnnnnnnnnnnnnnnnnnnnnnnnnnnnnnnnnnnnnnnnnnnnnnnnnnnnnnnnnnnnnnnnnnnnnnnnnnnnnnnnnnnnnnnnnnnnnnnnnnnnnnnnnnnnnnnnnnnnnnnnnnnnnnnnnnnnnnnnnnnnnnnnnnnnnnnnnnnnnnnnnnnnnnnnnnnnnnnnnnnnnnnnnnnnnnnnnnnnnnnnnnnnnnnnnnnnnnnnnnnnnnnnnnnnnnnnnnnnnnnnnnnnnnnnnnnnnnnnnnnnnnnnnnnnnnnnnnnnnnnnnnnnnnnnnnnnnnnnnnnnnnnnnnnnnnnnnnnnnnnnnnnnnnnnnnnnnnnnnnnnnnnnnnnnnnnnnnnnnnnnnnnnnnnnnnnnnnnnnnnnnnnnnnnnnnnnnnnnnnnnnnnnnnnnnnnnnnnnnnnnnnnnnnnnnnnnnnnnnnnnnnnnnnnnnnnnnnnnnnnnnnnnnnnnnnnnnnnnnnnnnnnnnnnnnnnnnnnnnnnnnnnnnnnnnnnnnnnnnnnnnnnnnnnnnnnnnnnnnnnnnnnnnnnnnnnnnnnnnnnnnnnnnnnnnnnnnnnnnnnnnnnnnnnnnnnnnnnnnnnnnnnnnnnnnnnnnnnnnnnnnnnnnnnnnnnnnnnnnnnnnnnnnnnnnnnnnnnnnnnnnnnnnnnnnnnnnnnnnnnnnnnnnnnnnnnnnnnnnnnnnnnnnnnnnnnnnnnnnnnnnnnnnnnnnnnnnnnnnnnnnnnnnnnnnnnnnnnnnnnnnnnnnnnnnnnnnnnnnnnnnnnnnnnnnnnnnnnnnnnnnnnnnnnnnnnnnnnnnnnnnnnnnnnnnnnnnnnnnnnnnnnnnnnnnnnnnnnnnnnnnnnnnnnnnnnnnnnnnnnnnnnnnnnnnnnnnnnnnnnnnnnnnnnnnnnnnnnnnnnnnnnnnnnnnnnnnnnnnnnnnnnnnnnnnnnnnnnnnnnnnnnnnnnnnnnnnnnnnnnnnnnnnnnnnnnnnnnnnnnnnnnnnnnnnnnnnnnnnnnnnnnnnnnnnnnnnnnnnnnnnnnnnnnnnnnnnnnnnnnnnnnnnnnnnnnnnnnnnnnnnnnnnnnnnnnnnnnnnnnnnnnnnnnnnnnnnnnnnnnnnnnnnnnnnnnnnnnnnnnnnnnnnnnnnnnnnnnnnnnnnnnnnnnnnnnnnnnnnnnnnnnnnnnnnnnnnnnnnnnnnnnnnnnnnnnnnnnnnnnnnnnnnnnnnnnnnnnnnnnnnnnnnnnnnnnnnnnnnnnnnnnnnnnnnnnnnnnnnnnnnnnnnnnnnnnnnnnnnnnnnnnnnnnnnnnnnnnnnnnnnnnnnnnnnnnnnnnnnnnnnnnnnnnnnnnnnnnnnnnnnnnnnnnnnnnnnnnnnnnnnnnnnnnnnnnnnnnnnnnnnnnnnnnnnnnnnnnnnnnnnnnnnnnnnnnnnnnnnnnnnnnnnnnnnnnnnnnnnnnnnnnnnnnnnnnnnnnnnnnnnnnnnnnnnnnnnnnnnnnnnnnnnnnnnnnnnnnnnnnnnnnnnnnnnnnnnnnnnnnnnnnnnnnnnnnnnnnnnnnnnnnnnnnnnnnnnnnnnnnnnnnnnnnnnnnnnnnnnnnnnnnnnnnnnnnnnnnnnnnnnnnnnnnnnnnnnnnnnnnnnnnnnnnnnnnnnnnnnnnnnnnnnnnnnnnnnnnnnnnnnnnnnnnnnnnnnnnnnnnnnnnnnnnnnnnnnnnnnnnnnnnnnnnnnnnnnnnnnnnnnnnnnnnnnnnnnnnnnnnnnnnnnnnnnnnnnnnnnnnnnnnnnnnnnnnnnnnnnnnnnnnnnnnnnnnnnnnnnnnnnnnnnnnnnnnnnnnnnnnnnnnnnnnnnnnnnnnnnnnnnnnnnnnnnnnnnnnnnnnnnnnnnnnnnnnnnnnnnnnnnnnnnnnnnnnnnnnnnnnnnnnnnnnnnnnnnnnnnnnnnnnnnnnnnnnnnnnnnnnnnnnnnnnnnnnnnnnnnnnnnnnnnnnnnnnnnnnnnnnnnnnnnnnnnnnnnnnnnnnnnnnnnnnnnnnnnnnnnnnnnnnnnnnnnnnnnnnnnnnnnnnnnnnnnnnnnnnnnnnnnnnnnnnnnnnnnnnnnnnnnnnnnnnnnnnnnnnnnnnnnnnnnnnnnnnnnnnnnnnnnnnnnnnnnnnnnnnnnnnnnnnnnnnnnnnnnnnnnnnnnnnnnnnnnnnnnnnnnnnnnnnnnnnnnnnnnnnnnnnnnnnnnnnnnnnnnnnnnnnnnnnnnnnnnnnnnnnnnnnnnnnnnnnnnnnnnnnnnnnnnnnnnnnnnnnnnnnnnnnnnnnnnnnnnnnnnnnnnnnnnnnnnnnnnnnnnnnnnnnnnnnnnnnnnnnnnnnnnnnnnnnnnnnnnnnnnnnnnnnnnnnnnnnnnnnnnnnnnnnnnnnnnnnnnnnnnnnnnnnnnnnnnnnnnnnnnnnnnnnnnnnnnnnnnnnnnnnnnnnnnnnnnnnnnnnnnnnnnnnnnnnnnnnnnnnnnnnnnnnnnnnnnnnnnnnnnnnnnnnnnnnnnnnnnnnnnnnnnnnnnnnnnnnnnnnnnnnnnnnnnnnnnnnnnnnnnnnnnnnnnnnnnnnnnnnnnnnnnnnnnnnnnnnnnnnnnnnnnnnnnnnnnnnnnnnnnnnnnnnnnnnnnnnnnnnnnnnnnnnnnnnnnnnnnnnnnnnnnnnnnnnnnnnnnnnnnnnnnnnnnnnnnnnnnnnnnnnnnnnnnnnnnnnnnnnnnnnnnnnnnnnnnnnnnnnnnnnnnnnnnnnnnnnnnnnnnnnnnnnnnnnnnnnnnnnnnnnnnnnnnnnnnnnnnnnnnnnnnnnnnnnnnnnnnnnnnnnnnnnnnnnnnnnnnnnnnnnnnnnnnnnnnnnnnnnnnnnnnnnnnnnnnnnnnnnnnnnnnnnnnnnnnnnnnnnnnnnnnnnnnnnnnnnnnnnnnnnnnnnnnnnnnnnnnnnnnnnnnnnnnnnnnnnnnnnnnnnnnnnnnnnnnnnnnnnnnnnnnnnnnnnnnnnnnnnnnnnnnnnnnnnnnnnnnnnnnnnnnnnnnnnnnnnnnnnnnnnnnnnnnnnnnnnnnnnnnnnnnnnnnnnnnnnnnnnnnnnnnnnnnnnnnnnnnnnnnnnnnnnnnnnnnnnnnnnnnnnnnnnnnnnnnnnnnnnnnnnnnnnnnnnnnnnnnnnnnnnnnnnnnnnnnnnnnnnnnnnnnnnnnnnnnnnnnnnnnnnnnnnnnnnnnnnnnnnnnnnnnnnnnnnnnnnnnnnnnnnnnnnnnnnnnnnnnnnnnnnnnnnnnnnnnnnnnnnnnnnnnnnnnnnnnnnnnnnnnnnnnnnnnnnnnnnnnnnnnnnnnnnnnnnnnnnnnnnnnnnnnnnnnnnnnnnnnnnnnnnnnnnnnnnnnnnnnnnnnnnnnnnnnnnnnnnnnnnnnnnnnnnnnnnnnnnnnnnnnnnnnnnnnnnnnnnnnnnnnnnnnnnnnnnnnnnnnnnnnnnnnnnnnnnnnnnnnnnnnnnnnnnnnnnnnnnnnnnnnnnnnnnnnnnnnnnnnnnnnnnnnnnnnnnnnnnnnnnnnnnnnnnnnnnnnnnnnnnnnnnnnnnnnnnnnnnnnnnnnnnnnnnnnnnnnnnnnnnnnnnnnnnnnnnnnnnnnnnnnnnnnnnnnnnnnnnnnnnnnnnnnnnnnnnnnnnnnnnnnnnnnnnnnnnnnnnnnnnnnnnnnnnnnnnnnnnnnnnnnnnnnnnnnnnnnnnnnnnnnnnnnnnnnnnnnnnnnnnnnnnnnnnnnnnnnnnnnnnnnnnnnnnnnnnnnnnnnnnnnnnnnnnnnnnnnnnnnnnnnnnnnnnnnnnnnnnnnnnnnnnnnnnnnnnnnnnnnnnnnnnnnnnnnnnnnnnnnnnnnnnnnnnnnnnnnnnnnnnnnnnnnnnnnnnnnnnnnnnnnnnnnnnnnnnnnnnnnnnnnnnnnnnnnnnnnnnnnnnnnnnnnnnnnnnnnnnnnnnnnnnnnnnnnnnnnnnnnnnnnnnnnnnnnnnnnnnnnnnnnnnnnnnnnnnnnnnnnnnnnnnnnnnnnnnnnnnnnnnnnnnnnnnnnnnnnnnnnnnnnnnnnnnnnnnnnnnnnnnnnnnnnnnnnnnnnnnnnnnnnnnnnnnnnnnnnnnnnnnnnnnnnnnnnnnnnnnnnnnnnnnnnnnnnnnnnnnnnnnnnnnnnnnnnnnnnnnnnnnnnnnnnnnnnnnnnnnnnnnnnnnnnnnnnnnnnnnnnnnnnnnnnnnnnnnnnnnnnnnnnnnnnnnnnnnnnnnnnnnnnnnnnnnnnnnnnnnnnnnnnnnnnnnnnnnnnnnnnnnnnnnnnnnnnnnnnnnnnnnnnnnnnnnnnnnnnnnnnnnnnnnnnnnnnnnnnnnnnnnnnnnnnnnnnnnnnnnnnnnnnnnnnnnnnnnnnnnnnnnnnnnnnnnnnnnnnnnnnnnnnnnnnnnnnnnnnnnnnnnnnnnnnnnnnnnnnnnnnnnnnnnnnnnnnnnnnnnnnnnnnnnnnnnnnnnnnnnnnnnnnnnnnnnnnnnnnnnnnnnnnnnnnnnnnnnnnnnnnnnnnnnnnnnnnnnnnnnnnnnnnnnnnnnnnnnnnnnnnnnnnnnnnnnnnnnnnnnnnnnnnnnnnnnnnnnnnnnnnnnnnnnnnnnnnnnnnnnnnnnnnnnnnnnnnnnnnnnnnnnnnnnnnnnnnnnnnnnnnnnnnnnnnnnnnnnnnnnnnnnnnnnnnnnnnnnnnnnnnnnnnnnnnnnnnnnnnnnnnnnnnnnnnnnnnnnnnnnnnnnnnnnnnnnnnnnnnnnnnnnnnnnnnnnnnnnnnnnnnnnnnnnnnnnnnnnnnnnnnnnnnnnnnnnnnnnnnnnnnnnnnnnnnnnnnnnnnnnnnnnnnnnnnnnnnnnnnnnnnnnnnnnnnnnnnnnnnnnnnnnnnnnnnnnnnnnnnnnnnnnnnnnnnnnnnnnnnnnnnnnnnnnnnnnnnnnnnnnnnnnnnnnnnnnnnnnnnnnnnnnnnnnnnnnnnnnnnnnnnnnnnnnnnnnnnnnnnnnnnnnnnnnnnnnnnnnnnnnnnnnnnnnnnnnnnnnnnnnnnnnnnnnnnnnnnnnnnnnnnnnnnnnnnnnnnnnnnnnnnnnnnnnnnnnnnnnnnnnnnnnnnnnnnnnnnnnnnnnnnnnnnnnnnnnnnnnnnnnnnnnnnnnnnnnnnnnnnnnnnnnnnnnnnnnnnnnnnnnnnnnnnnnnnnnnnnnnnnnnnnnnnnnnnnnnnnnnnnnnnnnnnnnnnnnnnnnnnnnnnnnnnnnnnnnnnnnnnnnnnnnnnnnnnnnnnnnnnnnnnnnnnnnnnnnnnnnnnnnnnnnnnnnnnnnnnnnnnnnnnnnnnnnnnnnnnnnnnnnnnnnnnnnnnnnnnnnnnnnnnnnnnnnnnnnnnnnnnnnnnnnnnnnnnnnnnnnnnnnnnnnnnnnnnnnnnnnnnnnnnnnnnnnnnnnnnnnnnnnnnnnnnnnnnnnnnnnnnnnnnnnnnnnnnnnnnnnnnnnnnnnnnnnnnnnnnnnnnnnnnnnnnnnnnnnnnnnnnnnnnnnnnnnnnnnnnnnnnnnnnnnnnnnnnnnnnnnnnnnnnnnnnnnnnnnnnnnnnnnnnnnnnnnnnnnnnnnnnnnnnnnnnnnnnnnnnnnnnnnnnnnnnnnnnnnnnnnnnnnnnnnnnnnnnnnnnnnnnnnnnnnnnnnnnnnnnnnnnnnnnnnnnnnnnnnnnnnnnnnnnnnnnnnnnnnnnnnnnnnnnnnnnnnnnnnnnnnnnnnnnnnnnnnnnnnnnnnnnnnnnnnnnnnnnnnnnnnnnnnnnnnnnnnnnnnnnnnnnnnnnnnnnnnnnnnnnnnnnnnnnnnnnnnnnnnnnnnnnnnnnnnnnnnnnnnnnnnnnnnnnnnnnnnnnnnnnnnnnnnnnnnnnnnnnnnnnnnnnnnnnnnnnnnnnnnnnnnnnnnnnnnnnnnnnnnnnnnnnnnnnnnnnnnnnnnnnnnnnnnnnnnnnnnnnnnnnnnnnnnnnnnnnnnnnnnnnnnnnnnnnnnnnnnnnnnnnnnnnnnnnnnnnnnnnnnnnnnnnnnnnnnnnnnnnnnnnnnnnnnnnnnnnnnnnnnnnnnnnnnnnnnnnnnnnnnnnnnnnnnnnnnnnnnnnnnnnnnnnnnnnnnnnnnnnnnnnnnnnnnnnnnnnnnnnnnnnnnnnnnnnnnnnnnnnnnnnnnnnnnnnnnnnnnnnnnnnnnnnnnnnnnnnnnnnnnnnnnnnnnnnnnnnnnnnnnnnnnnnnnnnnnnnnnnnnnnnnnnnnnnnnnnnnnnnnnnnnnnnnnnnnnnnnnnnnnnnnnnnnnnnnnnnnnnnnnnnnnnnnnnnnnnnnnnnnnnnnnnnnnnnnnnnnnnnnnnnnnnnnnnnnnnnnnnnnnnnnnnnnnnnnnnnnnnnnnnnnnnnnnnnnnnnnnnnnnnnnnnnnnnnnnnnnnnnnnnnnnnnnnnnnnnnnnnnnnnnnnnnnnnnnnnnnnnnnnnnnnnnnnnnnnnnnnnnnnnnnnnnnnnnnnnnnnnnnnnnnnnnnnnnnnnnnnnnnnnnnnnnnnnnnnnnnnnnnnnnnnnnnnnnnnnnnnnnnnnnnnnnnnnnnnnnnnnnnnnnnnnnnnnnnnnnnnnnnnnnnnnnnnnnnnnnnnnnnnnnnnnnnnnnnnnnnnnnnnnnnnnnnnnnnnnnnnnnnnnnnnnnnnnnnnnnnnnnnnnnnnnnnnnnnnnnnnnnnnnnnnnnnnnnnnnnnnnnnnnnnnnnnnnnnnnnnnnnnnnnnnnnnnnnnnnnnnnnnnnnnnnnnnnnnnnnnnnnnnnnnnnnnnnnnnnnnnnnnnnnnnnnnnnnnnnnnnnnnnnnnnnnnnnnnnnnnnnnnnnnnnnnnnnnnnnnnnnnnnnnnnnnnnnnnnnnnnnnnnnnnnnnnnnnnnnnnnnnnnnnnnnnnnnnnnnnnnnnnnnnnnnnnnnnnnnnnnnnnnnnnnnnnnnnnnnnnnnnnnnnnnnnnnnnnnnnnnnnnnnnnnnnnnnnnnnnnnnnnnnnnnnnnnnnnnnnnnnnnnnnnnnnnnnnnnnnnnnnnnnnnnnnnnnnnnnnnnnnnnnnnnnnnnnnnnnnnnnnnnnnnnnnnnnnnnnnnnnnnnnnnnnnnnnnnnnnnnnnnnnnnnnnnnnnnnnnnnnnnnnnnnnnnnnnnnnnnnnnnnnnnnnnnnnnnnnnnnnnnnnnnnnnnnnnnnnnnnnnnnnnnnnnnnnnnnnnnnnnnnnnnnnnnnnnnnnnnnnnnnnnnnnnnnnnnnnnnnnnnnnnnnnnnnnnnnnnnnnnnnnnnnnnnnnnnnnnnnnnnnnnnnnnnnnnnnnnnnnnnnnnnnnnnnnnnnnnnnnnnnnnnnnnnnnnnnnnnnnnnnnnnnnnnnnnnnnnnnnnnnnnnnnnnnnnnnnnnnnnnnnnnnnnnnnnnnnnnnnnnnnnnnnnnnnnnnnnnnnnnnnnnnnnnnnnnnnnnnnnnnnnnnnnnnnnnnnnnnnnnnnnnnnnnnnnnnnnnnnnnnnnnnnnnnnnnnnnnnnnnnnnnnnnnnnnnnnnnnnnnnnnnnnnnnnnnnnnnnnnnnnnnnnnnnnnnnnnnnnnnnnnnnnnnnnnnnnnnnnnnnnnnnnnnnnnnnnnnnnnnnnnnnnnnnnnnnnnnnnnnnnnnnnnnnnnnnnnnnnnnnnnnnnnnnnnnnnnnnnnnnnnnnnnnnnnnnnnnnnnnnnnnnnnnnnnnnnnnnnnnnnnnnnnnnnnnnnnnnnnnnnnnnnnnnnnnnnnnnnnnnnnnnnnnnnnnnnnnnnnnnnnnnnnnnnnnnnnnnnnnnnnnnnnnnnnnnnnnnnnnnnnnnnnnnnnnnnnnnnnnnnnnnnnnnnnnnnnnnnnnnnnnnnnnnnnnnnnnnnnnnnnnnnnnnnnnnnnnnnnnnnnnnnnnnnnnnnnnnnnnnnnnnnnnnnnnnnnnnnnnnnnnnnnnnnnnnnnnnnnnnnnnnnnnnnnnnnnnnnnnnnnnnnnnnnnnnnnnnnnnnnnnnnnnnnnnnnnnnnnnnnnnnnnnnnnnnnnnnnnnnnnnnnnnnnnnnnnnnnnnnnnnnnnnnnnnnnnnnnnnnnnnnnnnnnnnnnnnnnnnnnnnnnnnnnnnnnnnnnnnnnnnnnnnnnnnnnnnnnnnnnnnnnnnnnnnnnnnnnnnnnnnnnnnnnnnnnnnnnnnnnnnnnnnnnnnnnnnnnnnnnnnnnnnnnnnnnnnnnnnnnnnnnnnnnnnnnnnnnnnnnnnnnnnnnnnnnnnnnnnnnnnnnnnnnnnnnnnnnnnnnnnnnnnnnnnnnnnnnnnnnnnnnnnnnnnnnnnnnnnnnnnnnnnnnnnnnnnnnnnnnnnnnnnnnnnnnnnnnnnnnnnnnnnnnnnnnnnnnnnnnnnnnnnnnnnnnnnnnnnnnnnnnnnnnnnnnnnnnnnnnnnnnnnnnnnnnnnnnnnnnnnnnnnnnnnnnnnnnnnnnnnnnnnnnnnnnnnnnnnnnnnnnnnnnnnnnnnnnnnnnnnnnnnnnnnnnnnnnnnnnnnnnnnnnnnnnnnnnnnnnnnnnnnnnnnnnnnnnnnnnnnnnnnnnnnnnnnnnnnnnnnnnnnnnnnnnnnnnnnnnnnnnnnnnnnnnnnnnnnnnnnnnnnnnnnnnnnnnnnnnnnnnnnnnnnnnnnnnnnnnnnnnnnnnnnnnnnnnnnnnnnnnnnnnnnnnnnnnnnnnnnnnnnnnnnnnnnnnnnnnnnnnnnnnnnnnnnnnnnnnnnnnnnnnnnnnnnnnnnnnnnnnnnnnnnnnnnnnnnnnnnnnnnnnnnnnnnnnnnnnnnnnnnnnnnnnnnnnnnnnnnnnnnnnnnnnnnnnnnnnnnnnnnnnnnnnnnnnnnnnnnnnnnnnnnnnnnnnnnnnnnnnnnnnnnnnnnnnnnnnnnnnnnnnnnnnnnnnnnnnnnnnnnnnnnnnnnnnnnnnnnnnnnnnnnnnnnnnnnnnnnnnnnnnnnnnnnnnnnnnnnnnnnnnnnnnnnnnnnnnnnnnnnnnnnnnnnnnnnnnnnnnnnnnnnnnnnnnnnnnnnnnnnnnnnnnnnnnnnnnnnnnnnnnnnnnnnnnnnnnnnnnnnnnnnnnnnnnnnnnnnnnnnnnnnnnnnnnnnnnnnnnnnnnnnnnnnnnnnnnnnnnnnnnnnnnnnnnnnnnnnnnnnnnnnnnnnnnnnnnnnnnnnnnnnnnnnnnnnnnnnnnnnnnnnnnnnnnnnnnnnnnnnnnnnnnnnnnnnnnnnnnnnnnnnnnnnnnnnnnnnnnnnnnnnnnnnnnnnnnnnnnnnnnnnnnnnnnnnnnnnnnnnnnnnnnnnnnnnnnnnnnnnnnnnnnnnnnnnnnnnnnnnnnnnnnnnnnnnnnnnnnnnnnnnnnnnnnnnnnnnnnnnnnnnnnnnnnnnnnnnnnnnnnnnnnnnnnnnnnnnnnnnnnnnnnnnnnnnnnnnnnnnnnnnnnnnnnnnnnnnnnnnnnnnnnnnnnnnnnnnnnnnnnnnnnnnnnnnnnnnnnnnnnnnnnnnnnnnnnnnnnnnnnnnnnnnnnnnnnnnnnnnnnnnnnnnnnnnnnnnnnnnnnnnnnnnnnnnnnnnnnnnnnnnnnnnnnnnnnnnnnnnnnnnnnnnnnnnnnnnnnnnnnnnnnnnnnnnnnnnnnnnnnnnnnnnnnnnnnnnnnnnnnnnnnnnnnnnnnnnnnnnnnnnnnnnnnnnnnnnnnnnnnnnnnnnnnnnnnnnnnnnnnnnnnnnnnnnnnnnnnnnnnnnnnnnnnnnnnnnnnnnnnnnnnnnnnnnnnnnnnnnnnnnnnnnnnnnnnnnnnnnnnnnnnnnnnnnnnnnnnnnnnnnnnnnnnnnnnnnnnnnnnnnnnnnnnnnnnnnnnnnnnnnnnnnnnnnnnnnnnnnnnnnnnnnnnnnnnnnnnnnnnnnnnnnnnnnnnnnnnnnnnnnnnnnnnnnnnnnnnnnnnnnnnnnnnnnnnnnnnnnnnnnnnnnnnnnnnnnnnnnnnnnnnnnnnnnnnnnnnnnnnnnnnnnnnnnnnnnnnnnnnnnnnnnnnnnnnnnnnnnnnnnnnnnnnnnnnnnnnnnnnnnnnnnnnnnnnnnnnnnnnnnnnnnnnnnnnnnnnnnnnnnnnnnnnnnnnnnnnnnnnnnnnnnnnnnnnnnnnnnnnnnnnnnnnnnnnnnnnnnnnnnnnnnnnnnnnnnnnnnnnnnnnnnnnnnnnnnnnnnnnnnnnnnnnnnnnnnnnnnnnnnnnnnnnnnnnnnnnnnnnnnnnnnnnnnnnnnnnnnnnnnnnnnnnnnnnnnnnnnnnnnnnnnnnnnnnnnnnnnnnnnnnnnnnnnnnnnnnnnnnnnnnnnnnnnnnnnnnnnnnnnnnnnnnnnnnnnnnnnnnnnnnnnnnnnnnnnnnnnnnnnnnnnnnnnnnnnnnnnnnnnnnnnnnnnnnnnnnnnnnnnnnnnnnnnnnnnnnnnnnnnnnnnnnnnnnnnnnnnnnnnnnnnnnnnnnnnnnnnnnnnnnnnnnnnnnnnnnnnnnnnnnnnnnnnnnnnnnnnnnnnnnnnnnnnnnnnnnnnnnnnnnnnnnnnnnnnnnnnnnnnnnnnnnnnnnnnnnnnnnnnnnnnnnnnnnnnnnnnnnnnnnnnnnnnnnnnnnnnnnnnnnnnnnnnnnnnnnnnnnnnnnnnnnnnnnnnnnnnnnnnnnnnnnnnnnnnnnnnnnnnnnnnnnnnnnnnnnnnnnnnnnnnnnnnnnnnnnnnnnnnnnnnnnnnnnnnnnnnnnnnnnnnnnnnnnnnnnnnnnnnnnnnnnnnnnnnnnnnnnnnnnnnnnnnnnnnnnnnnnnnnnnnnnnnnnnnnnnnnnnnnnnnnnnnnnnnnnnnnnnnnnnnnnnnnnnnnnnnnnnnnnnnnnnnnnnnnnnnnnnnnnnnnnnnnnnnnnnnnnnnnnnnnnnnnnnnnnnnnnnnnnnnnnnnnnnnnnnnnnnnnnnnnnnnnnnnnnnnnnnnnnnnnnnnnnnnnnnnnnnnnnnnnnnnnnnnnnnnnnnnnnnnnnnnnnnnnnnnnnnnnnnnnnnnnnnnnnnnnnnnnnnnnnnnnnnnnnnnnnnnnnnnnnnnnnnnnnnnnnnnnnnnnnnnnnnnnnnnnnnnnnnnnnnnnnnnnnnnnnnnnnnnnnnnnnnnnnnnnnnnnnnnnnnnnnnnnnnnnnnnnnnnnnnnnnnnnnnnnnnnnnnnnnnnnnnnnnnnnnnnnnnnnnnnnnnnnnnnnnnnnnnnnnnnnnnnnnnnnnnnnnnnnnnnnnnnnnnnnnnnnnnnnnnnnnnnnnnnnnnnnnnnnnnnnnnnnnnnnnnnnnnnnnnnnnnnnnnnnnnnnnnnnnnnnnnnnnnnnnnnnnnnnnnnnnnnnnnnnnnnnnnnnnnnnnnnnnnnnnnnnnnnnnnnnnnnnnnnnnnnnnnnnnnnnnnnnnnnnnnnnnnnnnnnnnnnnnnnnnnnnnnnnnnnnnnnnnnnnnnnnnnnnnnnnnnnnnnnnnnnnnnnnnnnnnnnnnnnnnnnnnnnnnnnnnnnnnnnnnnnnnnnnnnnnnnnnnnnnnnnnnnnnnnnnnnnnnnnnnnnnnnnnnnnnnnnnnnnnnnnnnnnnnnnnnnnnnnnnnnnnnnnnnnnnnnnnnnnnnnnnnnnnnnnnnnnnnnnnnnnnnnnnnnnnnnnnnnnnnnnnnnnnnnnnnnnnnnnnnnnnnnnnnnnnnnnnnnnnnnnnnnnnnnnnnnnnnnnnnnnnnnnnnnnnnnnnnnnnnnnnnnnnnnnnnnnnnnnnnnnnnnnnnnnnnnnnnnnnnnnnnnnnnnnnnnnnnnnnnnnnnnnnnnnnnnnnnnnnnnnnnnnnnnnnnnnnnnnnnnnnnnnnnnnnnnnnnnnnnnnnnnnnnnnnnnnnnnnnnnnnnnnnnnnnnnnnnnnnnnnnnnnnnnnnnnnnnnnnnnnnnnnnnnnnnnnnnnnnnnnnnnnnnnnnnnnnnnnnnnnnnnnnnnnnnnnnnnnnnnnnnnnnnnnnnnnnnnnnnnnnnnnnnnnnnnnnnnnnnnnnnnnnnnnnnnnnnnnnnnnnnnnnnnnnnnnnnnnnnnnnnnnnnnnnnnnnnnnnnnnnnnnnnnnnnnnnnnnnnnnnnnnnnnnnnnnnnnnnnnnnnnnnnnnnnnnnnnnnnnnnnnnnnnnnnnnnnnnnnnnnnnnnnnnnnnnnnnnnnnnnnnnnnnnnnnnnnnnnnnnnnnnnnnnnnnnnnnnnnnnnnnnnnnnnnnnnnnnnnnnnnnnnnnnnnnnnnnnnnnnnnnnnnnnnnnnnnnnnnnnnnnnnnnnnnnnnnnnnnnnnnnnnnnnnnnnnnnnnnnnnnnnnnnnnnnnnnnnnnnnnnnnnnnnnnnnnnnnnnnnnnnnnnnnnnnnnnnnnnnnnnnnnnnnnnnnnnnnnnnnnnnnnnnnnnnnnnnnnnnnnnnnnnnnnnnnnnnnnnnnnnnnnnnnnnnnnnnnnnnnnnnnnnnnnnnnnnnnnnnnnnnnnnnnnnnnnnnnnnnnnnnnnnnnnnnnnnnnnnnnnnnnnnnnnnnnnnnnnnnnnnnnnnnnnnnnnnnnnnnnnnnnnnnnnnnnnnnnnnnnnnnnnnnnnnnnnnnnnnnnnnnnnnnnnnnnnnnnnnnnnnnnnnnnnnnnnnnnnnnnnnnnnnnnnnnnnnnnnnnnnnnnnnnnnnnnnnnnnnnnnnnnnnnnnnnnnnnnnnnnnnnnnnnnnnnnnnnnnnnnnnnnnnnnnnnnnnnnnnnnnnnnnnnnnnnnnnnnnnnnnnnnnnnnnnnnnnnnnnnnnnnnnnnnnnnnnnnnnnnnnnnnnnnnnnnnnnnnnnnnnnnnnnnnnnnnnnnnnnnnnnnnnnnnnnnnnnnnnnnnnnnnnnnnnnnnnnnnnnnnnnnnnnnnnnnnnnnnnnnnnnnnnnnnnnnnnnnnnnnnnnnnnnnnnnnnnnnnnnnnnnnnnnnnnnnnnnnnnnnnnnnnnnnnnnnnnnnnnnnnnnnnnnnnnnnnnnnnnnnnnnnnnnnnnnnnnnnnnnnnnnnnnnnnnnnnnnnnnnnnnnnnnnnnnnnnnnnnnnnnnnnnnnnnnnnnnnnnnnnnnnnnnnnnnnnnnnnnnnnnnnnnnnnnnnnnnnnnnnnnnnnnnnnnnnnnnnnnnnnnnnnnnnnnnnnnnnnnnnnnnnnnnnnnnnnnnnnnnnnnnnnnnnnnnnnnnnnnnnnnnnnnnnnnnnnnnnnnnnnnnnnnnnnnnnnnnnnnnnnnnnnnnnnnnnnnnnnnnnnnnnnnnnnnnnnnnnnnnnnnnnnnnnnnnnnnnnnnnnnnnnnnnnnnnnnnnnnnnnnnnnnnnnnnnnnnnnnnnnnnnnnnnnnnnnnnnnnnnnnnnnnnnnnnnnnnnnnnnnnnnnnnnnnnnnnnnnnnnnnnnnnnnnnnnnnnnnnnnnnnnnnnnnnnnnnnnnnnnnnnnnnnnnnnnnnnnnnnnnnnnnnnnnnnnnnnnnnnnnnnnnnnnnnnnnnnnnnnnnnnnnnnnnnnnnnnnnnnnnnnnnnnnnnnnnnnnnnnnnnnnnnnnnnnnnnnnnnnnnnnnnnnnnnnnnnnnnnnnnnnnnnnnnnnnnnnnnnnnnnnnnnnnnnnnnnnnnnnnnnnnnnnnnnnnnnnnnnnnnnnnnnnnnnnnnnnnnnnnnnnnnnnnnnnnnnnnnnnnnnnnnnnnnnnnnnnnnnnnnnnnnnnnnnnnnnnnnnnnnnnnnnnnnnnnnnnnnnnnnnnnnnnnnnnnnnnnnnnnnnnnnnnnnnnnnnnnnnnnnnnnnnnnnnnnnnnnnnnnnnnnnnnnnnnnnnnnnnnnnnnnnnnnnnnnnnnnnnnnnnnnnnnnnnnnnnnnnnnnnnnnnnnnnnnnnnnnnnnnnnnnnnnnnnnnnnnnnnnnnnnnnnnnnnnnnnnnnnnnnnnnnnnnnnnnnnnnnnnnnnnnnnnnnnnnnnnnnnnnnnnnnnnnnnnnnnnnnnnnnnnnnnnnnnnnnnnnnnnnnnnnnnnnnnnnnnnnnnnnnnnnnnnnnnnnnnnnnnnnnnnnnnnnnnnnnnnnnnnnnnnnnnnnnnnnnnnnnnnnnnnnnnnnnnnnnnnnnnnnnnnnnnnnnnnnnnnnnnnnnnnnnnnnnnnnnnnnnnnnnnnnnnnnnnnnnnnnnnnnnnnnnnnnnnnnnnnnnnnnnnnnnnnnnnnnnnnnnnnnnnnnnnnnnnnnnnnnnnnnnnnnnnnnnnnnnnnnnnnnnnnnnnnnnnnnnnnnnnnnnnnnnnnnnnnnnnnnnnnnnnnnnnnnnnnnnnnnnnnnnnnnnnnnnnnnnnnnnnnnnnnnnnnnnnnnnnnnnnnnnnnnnnnnnnnnnnnnnnnnnnnnnnnnnnnnnnnnnnnnnnnnnnnnnnnnnnnnnnnnnnnnnnnnnnnnnnnnnnnnnnnnnnnnnnnnnnnnnnnnnnnnnnnnnnnnnnnnnnnnnnnnnnnnnnnnnnnnnnnnnnnnnnnnnnnnnnnnnnnnnnnnnnnnnnnnnnnnnnnnnnnnnnnnnnnnnnnnnnnnnnnnnnnnnnnnnnnnnnnnnnnnnnnnnnnnnnnnnnnnnnnnnnnnnnnnnnnnnnnnnnnnnnnnnnnnnnnnnnnnnnnnnnnnnnnnnnnnnnnnnnnnnnnnnnnnnnnnnnnnnnnnnnnnnnnnnnnnnnnnnnnnnnnnnnnnnnnnnnnnnnnnnnnnnnnnnnnnnnnnnnnnnnnnnnnnnnnnnnnnnnnnnnnnnnnnnnnnnnnnnnnnnnnnnnnnnnnnnnnnnnnnnnnnnnnnnnnnnnnnnnnnnnnnnnnnnnnnnnnnnnnnnnnnnnnnnnnnnnnnnnnnnnnnnnnnnnnnnnnnnnnnnnnnnnnnnnnnnnnnnnnnnnnnnnnnnnnnnnnnnnnnnnnnnnnnnnnnnnnnnnnnnnnnnnnnnnnnnnnnnnnnnnnnnnnnnnnnnnnnnnnnnnnnnnnnnnnnnnnnnnnnnnnnnnnnnnnnnnnnnnnnnnnnnnnnnnnnnnnnnnnnnnnnnnnnnnnnnnnnnnnnnnnnnnnnnnnnnnnnnnnnnnnnnnnnnnnnnnnnnnnnnnnnnnnnnnnnnnnnnnnnnnnnnnnnnnnnnnnnnnnnnnnnnnnnnnnnnnnnnnnnnnnnnnnnnnnnnnnnnnnnnnnnnnnnnnnnnnnnnnnnnnnnnnnnnnnnnnnnnnnnnnnnnnnnnnnnnnnnnnnnnnnnnnnnnnnnnnnnnnnnnnnnnnnnnnnnnnnnnnnnnnnnnnnnnnnnnnnnnnnnnnnnnnnnnnnnnnnnnnnnnnnnnnnnnnnnnnnnnnnnnnnnnnnnnnnnnnnnnnnnnnnnnnnnnnnnnnnnnnnnnnnnnnnnnnnnnnnnnnnnnnnnnnnnnnnnnnnnnnnnnnnnnnnnnnnnnnnnnnnnnnnnnnnnnnnnnnnnnnnnnnnnnnnnnnnnnnnnnnnnnnnnnnnnnnnnnnnnnnnnnnnnnnnnnnnnnnnnnnnnnnnnnnnnnnnnnnnnnnnnnnnnnnnnnnnnnnnnnnnnnnnnnnnnnnnnnnnnnnnnnnnnnnnnnnnnnnnnnnnnnnnnnnnnnnnnnnnnnnnnnnnnnnnnnnnnnnnnnnnnnnnnnnnnnnnnnnnnnnnnnnnnnnnnnnnnnnnnnnnnnnnnnnnnnnnnnnnnnnnnnnnnnnnnnnnnnnnnnnnnnnnnnnnnnnnnnnnnnnnnnnnnnnnnnnnnnnnnnnnnnnnnnnnnnnnnnnnnnnnnnnnnnnnnnnnnnnnnnnnnnnnnnnnnnnnnnnnnnnnnnnnnnnnnnnnnnnnnnnnnnnnnnnnnnnnnnnnnnnnnnnnnnnnnnnnnnnnnnnnnnnnnnnnnnnnnnnnnnnnnnnnnnnnnnnnnnnnnnnnnnnnnnnnnnnnnnnnnnnnnnnnnnnnnnnnnnnnnnnnnnnnnnnnnnnnnnnnnnnnnnnnnnnnnnnnnnnnnnnnnnnnnnnnnnnnnnnnnnnnnnnnnnnnnnnnnnnnnnnnnnnnnnnnnnnnnnnnnnnnnnnnnnnnnnnnnnnnnnnnnnnnnnnnnnnnnnnnnnnnnnnnnnnnnnnnnnnnnnnnnnnnnnnnnnnnnnnnnnnnnnnnnnnnnnnnnnnnnnnnnnnnnnnnnnnnnnnnnnnnnnnnnnnnnnnnnnnnnnnnnnnnnnnnnnnnnnnnnnnnnnnnnnnnnnnnnnnnnnnnnnnnnnnnnnnnnnnnnnnnnnnnnnnnnnnnnnnnnnnnnnnnnnnnnnnnnnnnnnnnnnnnnnnnnnnnnnnnnnnnnnnnnnnnnnnnnnnnnnnnnnnnnnnnnnnnnnnnnnnnnnnnnnnnnnnnnnnnnnnnnnnnnnnnnnnnnnnnnnnnnnnnnnnnnnnnnnnnnnnnnnnnnnnnnnnnnnnnnnnnnnnnnnnnnnnnnnnnnnnnnnnnnnnnnnnnnnnnnnnnnnnnnnnnnnnnnnnnnnnnnnnnnnnnnnnnnnnnnnnnnnnnnnnnnnnnnnnnnnnnnnnnnnnnnnnnnnnnnnnnnnnnnnnnnnnnnnnnnnnnnnnnnnnnnnnnnnnnnnnnnnnnnnnnnnnnnnnnnnnnnnnnnnnnnnnnnnnnnnnnnnnnnnnnnnnnnnnnnnnnnnnnnnnnnnnnnnnnnnnnnnnnnnnnnnnnnnnnnnnnnnnnnnnnnnnnnnnnnnnnnnnnnnnnnnnnnnnnnnnnnnnnnnnnnnnnnnnnnnnnnnnnnnnnnnnnnnnnnnnnnnnnnnnnnnnnnnnnnnnnnnnnnnnnnnnnnnnnnnnnnnnnnnnnnnnnnnnnnnnnnnnnnnnnnnnnnnnnnnnnnnnnnnnnnnnnnnnnnnnnnnnnnnnnnnnnnnnnnnnnnnnnnnnnnnnnnnnnnnnnnnnnnnnnnnnnnnnnnnnnnnnnnnnnnnnnnnnnnnnnnnnnnnnnnnnnnnnnnnnnnnnnnnnnnnnnnnnnnnnnnnnnnnnnnnnnnnnnnnnnnnnnnnnnnnnnnnnnnnnnnnnnnnnnnnnnnnnnnnnnnnnnnnnnnnnnnnnnnnnnnnnnnnnnnnnnnnnnnnnnnnnnnnnnnnnnnnnnnnnnnnnnnnnnnnnnnnnnnnnnnnnnnnnnnnnnnnnnnnnnnnnnnnnnnnnnnnnnnnnnnnnnnnnnnnnnnnnnnnnnnnnnnnnnnnnnnnnnnnnnnnnnnnnnnnnnnnnnnnnnnnnnnnnnnnnnnnnnnnnnnnnnnnnnnnnnnnnnnnnnnnnnnnnnnnnnnnnnnnnnnnnnnnnnnnnnnnnnnnnnnnnnnnnnnnnnnnnnnnnnnnnnnnnnnnnnnnnnnnnnnnnnnnnnnnnnnnnnnnnnnnnnnnnnnnnnnnnnnnnnnnnnnnnnnnnnnnnnnnnnnnnnnnnnnnnnnnnnnnnnnnnnnnnnnnnnnnnnnnnnnnnnnnnnnnnnnnnnnnnnnnnnnnnnnnnnnnnnnnnnnnnnnnnnnnnnnnnnnnnnnnnnnnnnnnnnnnnnnnnnnnnnnnnnnnnnnnnnnnnnnnnnnnnnnnnnnnnnnnnnnnnnnnnnnnnnnnnnnnnnnnnnnnnnnnnnnnnnnnnnnnnnnnnnnnnnnnnnnnnnnnnnnnnnnnnnnnnnnnnnnnnnnnnnnnnnnnnnnnnnnnnnnnnnnnnnnnnnnnnnnnnnnnnnnnnnnnnnnnnnnnnnnnnnnnnnnnnnnnnnnnnnnnnnnnnnnnnnnnnnnnnnnnnnnnnnnnnnnnnnnnnnnnnnnnnnnnnnnnnnnnnnnnnnnnnnnnnnnnnnnnnnnnnnnnnnnnnnnnnnnnnnnnnnnnnnnnnnnnnnnnnnnnnnnnnnnnnnnnnnnnnnnnnnnnnnnnnnnnnnnnnnnnnnnnnnnnnnnnnnnnnnnnnnnnnnnnnnnnnnnnnnnnnnnnnnnnnnnnnnnnnnnnnnnnnnnnnnnnnnnnnnnnnnnnnnnnnnnnnnnnnnnnnnnnnnnnnnnnnnnnnnnnnnnnnnnnnnnnnnnnnnnnnnnnnnnnnnnnnnnnnnnnnnnnnnnnnnnnnnnnnnnnnnnnnnnnnnnnnnnnnnnnnnnnnnnnnnnnnnnnnnnnnnnnnnnnnnnnnnnnnnnnnnnnnnnnnnnnnnnnnnnnnnnnnnnnnnnnnnnnnnnnnnnnnnnnnnnnnnnnnnnnnnnnnnnnnnnnnnnnnnnnnnnnnnnnnnnnnnnnnnnnnnnnnnnnnnnnnnnnnnnnnnnnnnnnnnnnnnnnnnnnnnnnnnnnnnnnnnnnnnnnnnnnnnnnnnnnnnnnnnnnnnnnnnnnnnnnnnnnnnnnnnnnnnnnnnnnnnnnnnnnnnnnnnnnnnnnnnnnnnnnnnnnnnnnnnnnnnnnnnnnnnnnnnnnnnnnnnnnnnnnnnnnnnnnnnnnnnnnnnnnnnnnnnnnnnnnnnnnnnnnnnnnnnnnnnnnnnnnnnnnnnnnnnnnnnnnnnnnnnnnnnnnnnnnnnnnnnnnnnnnnnnnnnnnnnnnnnnnnnnnnnnnnnnnnnnnnnnnnnnnnnnnnnnnnnnnnnnnnnnnnnnnnnnnnnnnnnnnnnnnnnnnnnnnnnnnnnnnnnnnnnnnnnnnnnnnnnnnnnnnnnnnnnnnnnnnnnnnnnnnnnnnnnnnnnnnnnnnnnnnnnnnnnnnnnnnnnnnnnnnnnnnnnnnnnnnnnnnnnnnnnnnnnnnnnnnnnnnnnnnnnnnnnnnnnnnnnnnnnnnnnnnnnnnnnnnnnnnnnnnnnnnnnnnnnnnnnnnnnnnnnnnnnnnnnnnnnnnnnnnnnnnnnnnnnnnnnnnnnnnnnnnnnnnnnnnnnnnnnnnnnnnnnnnnnnnnnnnnnnnnnnnnnnnnnnnnnnnnnnnnnnnnnnnnnnnnnnnnnnnnnnnnnnnnnnnnnnnnnnnnnnnnnnnnnnnnnnnnnnnnnnnnnnnnnnnnnnnnnnnnnnnnnnnnnnnnnnnnnnnnnnnnnnnnnnnnnnnnnnnnnnnnnnnnnnnnnnnnnnnnnnnnnnnnnnnnnnnnnnnnnnnnnnnnnnnnnnnnnnnnnnnnnnnnnnnnnnnnnnnnnnnnnnnnnnnnnnnnnnnnnnnnnnnnnnnnnnnnnnnnnnnnnnnnnnnnnnnnnnnnnnnnnnnnnnnnnnnnnnnnnnnnnnnnnnnnnnnnnnnnnnnnnnnnnnnnnnnnnnnnnnnnnnnnnnnnnnnnnnnnnnnnnnnnnnnnnnnnnnnnnnnnnnnnnnnnnnnnnnnnnnnnnnnnnnnnnnnnnnnnnnnnnnnnnnnnnnnnnnnnnnnnnnnnnnnnnnnnnnnnnnnnnnnnnnnnnnnnnnnnnnnnnnnnnnnnnnnnnnnnnnnnnnnnnnnnnnnnnnnnnnnnnnnnnnnnnnnnnnnnnnnnnnnnnnnnnnnnnnnnnnnnnnnnnnnnnnnnnnnnnnnnnnnnnnnnnnnnnnnnnnnnnnnnnnnnnnnnnnnnnnnnnnnnnnnnnnnnnnnnnnnnnnnnnnnnnnnnnnnnnnnnnnnnnnnnnnnnnnnnnnnnnnnnnnnnnnnnnnnnnnnnnnnnnnnnnnnnnnnnnnnnnnnnnnnnnnnnnnnnnnnnnnnnnnnnnnnnnnnnnnnnnnnnnnnnnnnnnnnnnnnnnnnnnnnnnnnnnnnnnnnnnnnnnnnnnnnnnnnnnnnnnnnnnnnnnnnnnnnnnnnnnnnnnnnnnnnnnnnnnnnnnnnnnnnnnnnnnnnnnnnnnnnnnnnnnnnnnnnnnnnnnnnnnnnnnnnnnnnnnnnnnnnnnnnnnnnnnnnnnnnnnnnnnnnnnnnnnnnnnnnnnnnnnnnnnnnnnnnnnnnnnnnnnnnnnnnnnnnnnnnnnnnnnnnnnnnnnnnnnnnnnnnnnnnnnnnnnnnnnnnnnnnnnnnnnnnnnnnnnnnnnnnnnnnnnnnnnnnnnnnnnnnnnnnnnnnnnnnnnnnnnnnnnnnnnnnnnnnnnnnnnnnnnnnnnnnnnnnnnnnnnnnnnnnnnnnnnnnnnnnnnnnnnnnnnnnnnnnnnnnnnnnnnnnnnnnnnnnnnnnnnnnnnnnnnnnnnnnnnnnnnnnnnnnnnnnnnnnnnnnnnnnnnnnnnnnnnnnnnnnnnnnnnnnnnnnnnnnnnnnnnnnnnnnnnnnnnnnnnnnnnnnnnnnnnnnnnnnnnnnnnnnnnnnnnnnnnnnnnnnnnnnnnnnnnnnnnnnnnnnnnnnnnnnnnnnnnnnnnnnnnnnnnnnnnnnnnnnnnnnnnnnnnnnnnnnnnnnnnnnnnnnnnnnnnnnnnnnnnnnnnnnnnnnnnnnnnnnnnnnnnnnnnnnnnnnnnnnnnnnnnnnnnnnnnnnnnnnnnnnnnnnnnnnnnnnnnnnnnnnnnnnnnnnnnnnnnnnnnnnnnnnnnnnnnnnnnnnnnnnnnnnnnnnnnnnnnnnnnnnnnnnnnnnnnnnnnnnnnnnnnnnnnnnnnnnnnnnnnnnnnnnnnnnnnnnnnnnnnnnnnnnnnnnnnnnnnnnnnnnnnnnnnnnnnnnnnnnnnnnnnnnnnnnnnnnnnnnnnnnnnnnnnnnnnnnnnnnnnnnnnnnnnnnnnnnnnnnnnnnnnnnnnnnnnnnnnnnnnnnnnnnnnnnnnnnnnnnnnnnnnnnnnnnnnnnnnnnnnnnnnnnnnnnnnnnnnnnnnnnnnnnnnnnnnnnnnnnnnnnnnnnnnnnnnnnnnnnnnnnnnnnnnnnnnnnnnnnnnnnnnnnnnnnnnnnnnnnnnnnnnnnnnnnnnnnnnnnnnnnnnnnnnnnnnnnnnnnnnnnnnnnnnnnnnnnnnnnnnnnnnnnnnnnnnnnnnnnnnnnnnnnnnnnnnnnnnnnnnnnnnnnnnnnnnnnnnnnnnnnnnnnnnnnnnnnnnnnnnnnnnnnnnnnnnnnnnnnnnnnnnnnnnnnnnnnnnnnnnnnnnnnnnnnnnnnnnnnnnnnnnnnnnnnnnnnnnnnnnnnnnnnnnnnnnnnnnnnnnnnnnnnnnnnnnnnnnnnnnnnnnnnnnnnnnnnnnnnnnnnnnnnnnnnnnnnnnnnnnnnnnnnnnnnnnnnnnnnnnnnnnnnnnnnnnnnnnnnnnnnnnnnnnnnnnnnnnnnnnnnnnnnnnnnnnnnnnnnnnnnnnnnnnnnnnnnnnnnnnnnnnnnnnnnnnnnnnnnnnnnnnnnnnnnnnnnnnnnnnnnnnnnnnnnnnnnnnnnnnnnnnnnnnnnnnnnnnnnnnnnnnnnnnnnnnnnnnnnnnnnnnnnnnnnnnnnnnnnnnnnnnnnnnnnnnnnnnnnnnnnnnnnnnnnnnnnnnnnnnnnnnnnnnnnnnnnnnnnnnnnnnnnnnnnnnnnnnnnnnnnnnnnnnnnnnnnnnnnnnnnnnnnnnnnnnnnnnnnnnnnnnnnnnnnnnnnnnnnnnnnnnnnnnnnnnnnnnnnnnnnnnnnnnnnnnnnnnnnnnnnnnnnnnnnnnnnnnnnnnnnnnnnnnnnnnnnnnnnnnnnnnnnnnnnnnnnnnnnnnnnnnnnnnnnnnnnnnnnnnnnnnnnnnnnnnnnnnnnnnnnnnnnnnnnnnnnnnnnnnnnnnnnnnnnnnnnnnnnnnnnnnnnnnnnnnnnnnnnnnnnnnnnnnnnnnnnnnnnnnnnnnnnnnnnnnnnnnnnnnnnnnnnnnnnnnnnnnnnnnnnnnnnnnnnnnnnnnnnnnnnnnnnnnnnnnnnnnnnnnnnnnnnnnnnnnnnnnnnnnnnnnnnnnnnnnnnnnnnnnnnnnnnnnnnnnnnnnnnnnnnnnnnnnnnnnnnnnnnnnnnnnnnnnnnnnnnnnnnnnnnnnnnnnnnnnnnnnnnnnnnnnnnnnnnnnnnnnnnnnnnnnnnnnnnnnnnnnnnnnnnnnnnnnnnnnnnnnnnnnnnnnnnnnnnnnnnnnnnnnnnnnnnnnnnnnnnnnnnnnnnnnnnnnnnnnnnnnnnnnnnnnnnnnnnnnnnnnnnnnnnnnnnnnnnnnnnnnnnnnnnnnnnnnnnnnnnnnnnnnnnnnnnnnnnnnnnnnnnnnnnnnnnnnnnnnnnnnnnnnnnnnnnnnnnnnnnnnnnnnnnnnnnnnnnnnnnnnnnnnnnnnnnnnnnnnnnnnnnnnnnnnnnnnnnnnnnnnnnnnnnnnnnnnnnnnnnnnnnnnnnnnnnnnnnnnnnnnnnnnnnnnnnnnnnnnnnnnnnnnnnnnnnnnnnnnnnnnnnnnnnnnnnnnnnnnnnnnnnnnnnnnnnnnnnnnnnnnnnnnnnnnnnnnnnnnnnnnnnnnnnnnnnnnnnnnnnnnnnnnnnnnnnnnnnnnnnnnnnnnnnnnnnnnnnnnnnnnnnnnnnnnnnnnnnnnnnnnnnnnnnnnnnnnnnnnnnnnnnnnnnnnnnnnnnnnnnnnnnnnnnnnnnnnnnnnnnnnnnnnnnnnnnnnnnnnnnnnnnnnnnnnnnnnnnnnnnnnnnnnnnnnnnnnnnnnnnnnnnnnnnnnnnnnnnnnnnnnnnnnnnnnnnnnnnnnnnnnnnnnnnnnnnnnnnnnnnnnnnnnnnnnnnnnnnnnnnnnnnnnnnnnnnnnnnnnnnnnnnnnnnnnnnnnnnnnnnnnnnnnnnnnnnnnnnnnnnnnnnnnnnnnnnnnnnnnnnnnnnnnnnnnnnnnnnnnnnnnnnnnnnnnnnnnnnnnnnnnnnnnnnnnnnnnnnnnnnnnnnnnnnnnnnnnnnnnnnnnnnnnnnnnnnnnnnnnnnnnnnnnnnnnnnnnnnnnnnnnnnnnnnnnnnnnnnnnnnnnnnnnnnnnnnnnnnnnnnnnnnnnnnnnnnnnnnnnnnnnnnnnnnnnnnnnnnnnnnnnnnnnnnnnnnnnnnnnnnnnnnnnnnnnnnnnnnnnnnnnnnnnnnnnnnnnnnnnnnnnnnnnnnnnnnnnnnnnnnnnnnnnnnnnnnnnnnnnnnnnnnnnnnnnnnnnnnnnnnnnnnnnnnnnnnnnnnnnnnnnnnnnnnnnnnnnnnnnnnnnnnnnnnnnnnnnnnnnnnnnnnnnnnnnnnnnnnnnnnnnnnnnnnnnnnnnnnnnnnnnnnnnnnnnnnnnnnnnnnnnnnnnnnnnnnnnnnnnnnnnnnnnnnnnnnnnnnnnnnnnnnnnnnnnnnnnnnnnnnnnnnnnnnnnnnnnnnnnnnnnnnnnnnnnnnnnnnnnnnnnnnnnnnnnnnnnnnnnnnnnnnnnnnnnnnnnnnnnnnnnnnnnnnnnnnnnnnnnnnnnnnnnnnnnnnnnnnnnnnnnnnnnnnnnnnnnnnnnnnnnnnnnnnnnnnnnnnnnnnnnnnnnnnnnnnnnnnnnnnnnnnnnnnnnnnnnnnnnnnnnnnnnnnnnnnnnnnnnnnnnnnnnnnnnnnnnnnnnnnnnnnnnnnnnnnnnnnnnnnnnnnnnnnnnnnnnnnnnnnnnnnnnnnnnnnnnnnnnnnnnnnnnnnnnnnnnnnnnnnnnnnnnnnnnnnnnnnnnnnnnnnnnnnnnnnnnnnnnnnnnnnnnnnnnnnnnnnnnnnnnnnnnnnnnnnnnnnnnnnnnnnnnnnnnnnnnnnnnnnnnnnnnnnnnnnnnnnnnnnnnnnnnnnnnnnnnnnnnnnnnnnnnnnnnnnnnnnnnnnnnnnnnnnnnnnnnnnnnnnnnnnnnnnnnnnnnnnnnnnnnnnnnnnnnnnnnnnnnnnnnnnnnnnnnnnnnnnnnnnnnnnnnnnnnnnnnnnnnnnnnnnnnnnnnnnnnnnnnnnnnnnnnnnnnnnnnnnnnnnnnnnnnnnnnnnnnnnnnnnnnnnnnnnnnnnnnnnnnnnnnnnnnnnnnnnnnnnnnnnnnnnnnnnnnnnnnnnnnnnnnnnnnnnnnnnnnnnnnnnnnnnnnnnnnnnnnnnnnnnnnnnnnnnnnnnnnnnnnnnnnnnnnnnnnnnnnnnnnnnnnnnnnnnnnnnnnnnnnnnnnnnnnnnnnnnnnnnnnnnnnnnnnnnnnnnnnnnnnnnnnnnnnnnnnnnnnnnnnnnnnnnnnnnnnnnnnnnnnnnnnnnnnnnnnnnnnnnnnnnnnnnnnnnnnnnnnnnnnnnnnnnnnnnnnnnnnnnnnnnnnnnnnnnnnnnnnnnnnnnnnnnnnnnnnnnnnnnnnnnnnnnnnnnnnnnnnnnnnnnnnnnnnnnnnnnnnnnnnnnnnnnnnnnnnnnnnnnnnnnnnnnnnnnnnnnnnnnnnnnnnnnnnnnnnnnnnnnnnnnnnnnnnnnnnnnnnnnnnnnnnnnnnnnnnnnnnnnnnnnnnnnnnnnnnnnnnnnnnnnnnnnnnnnnnnnnnnnnnnnnnnnnnnnnnnnnnnnnnnnnnnnnnnnnnnnnnnnnnnnnnnnnnnnnnnnnnnnnnnnnnnnnnnnnnnnnnnnnnnnnnnnnnnnnnnnnnnnnnnnnnnnnnnnnnnnnnnnnnnnnnnnnnnnnnnnnnnnnnnnnnnnnnnnnnnnnnnnnnnnnnnnnnnnnnnnnnnnnnnnnnnnnnnnnnnnnnnnnnnnnnnnnnnnnnnnnnnnnnnnnnnnnnnnnnnnnnnnnnnnnnnnnnnnnnnnnnnnnnnnnnnnnnnnnnnnnnnnnnnnnnnnnnnnnnnnnnnnnnnnnnnnnnnnnnnnnnnnnnnnnnnnnnnnnnnnnnnnnnnnnnnnnnnnnnnnnnnnnnnnnnnnnnnnnnnnnnnnnnnnnnnnnnnnnnnnnnnnnnnnnnnnnnnnnnnnnnnnnnnnnnnnnnnnnnnnnnnnnnnnnnnnnnnnnnnnnnnnnnnnnnnnnnnnnnnnnnnnnnnnnnnnnnnnnnnnnnnnnnnnnnnnnnnnnnnnnnnnnnnnnnnnnnnnnnnnnnnnnnnnnnnnnnnnnnnnnnnnnnnnnnnnnnnnnnnnnnnnnnnnnnnnnnnnnnnnnnnnnnnnnnnnnnnnnnnnnnnnnnnnnnnnnnnnnnnnnnnnnnnnnnnnnnnnnnnnnnnnnnnnnnnnnnnnnnnnnnnnnnnnnnnnnnnnnnnnnnnnnnnnnnnnnnnnnnnnnnnnnnnnnnnnnnnnnnnnnnnnnnnnnnnnnnnnnnnnnnnnnnnnnnnnnnnnnnnnnnnnnnnnnnnnnnnnnnnnnnnnnnnnnnnnnnnnnnnnnnnnnnnnnnnnnnnnnnnnnnnnnnnnnnnnnnnnnnnnnnnnnnnnnnnnnnnnnnnnnnnnnnnnnnnnnnnnnnnnnnnnnnnnnnnnnnnnnnnnnnnnnnnnnnnnnnnnnnnnnnnnnnnnnnnnnnnnnnnnnnnnnnnnnnnnnnnnnnnnnnnnnnnnnnnnnnnnnnnnnnnnnnnnnnnnnnnnnnnnnnnnnnnnnnnnnnnnnnnnnnnnnnnnnnnnnnnnnnnnnnnnnnnnnnnnnnnnnnnnnnnnnnnnnnnnnnnnnnnnnnnnnnnnnnnnnnnnnnnnnnnnnnnnnnnnnnnnnnnnnnnnnnnnnnnnnnnnnnnnnnnnnnnnnnnnnnnnnnnnnnnnnnnnnnnnnnnnnnnnnnnnnnnnnnnnnnnnnnnnnnnnnnnnnnnnnnnnnnnnnnnnnnnnnnnnnnnnnnnnnnnnnnnnnnnnnnnnnnnnnnnnnnnnnnnnnnnnnnnnnnnnnnnnnnnnnnnnnnnnnnnnnnnnnnnnnnnnnnnnnnnnnnnnnnnnnnnnnnnnnnnnnnnnnnnnnnnnnnnnnnnnnnnnnnnnnnnnnnnnnnnnnnnnnnnnnnnnnnnnnnnnnnnnnnnnnnnnnnnnnnnnnnnnnnnnnnnnnnnnnnnnnnnnnnnnnnnnnnnnnnnnnnnnnnnnnnnnnnnnnnnnnnnnnnnnnnnnnnnnnnnnnnnnnnnnnnnnnnnnnnnnnnnnnnnnnnnnnnnnnnnnnnnnnnnnnnnnnnnnnnnnnnnnnnnnnnnnnnnnnnnnnnnnnnnnnnnnnnnnnnnnnnnnnnnnnnnnnnnnnnnnnnnnnnnnnnnnnnnnnnnnnnnnnnnnnnnnnnnnnnnnnnnnnnnnnnnnnnnnnnnnnnnnnnnnnnnnnnnnnnnnnnnnnnnnnnnnnnnnnnnnnnnnnnnnnnnnnnnnnnnnnnnnnnnnnnnnnnnnnnnnnnnnnnnnnnnnnnnnnnnnnnnnnnnnnnnnnnnnnnnnnnnnnnnnnnnnnnnnnnnnnnnnnnnnnnnnnnnnnnnnnnnnnnnnnnnnnnnnnnnnnnnnnnnnnnnnnnnnnnnnnnnnnnnnnnnnnnnnnnnnnnnnnnnnnnnnnnnnnnnnnnnnnnnnnnnnnnnnnnnnnnnnnnnnnnnnnnnnnnnnnnnnnnnnnnnnnnnnnnnnnnnnnnnnnnnnnnnnnnnnnnnnnnnnnnnnnnnnnnnnnnnnnnnnnnnnnnnnnnnnnnnnnnnnnnnnnnnnnnnnnnnnnnnnnnnnnnnnnnnnnnnnnnnnnnnnnnnnnnnnnnnnnnnnnnnnnnnnnnnnnnnnnnnnnnnnnnnnnnnnnnnnnnnnnnnnnnnnnnnnnnnnnnnnnnnnnnnnnnnnnnnnnnnnnnnnnnnnnnnnnnnnnnnnnnnnnnnnnnnnnnnnnnnnnnnnnnnnnnnnnnnnnnnnnnnnnnnnnnnnnnnnnnnnnnnnnnnnnnnnnnnnnnnnnnnnnnnnnnnnnnnnnnnnnnnnnnnnnnnnnnnnnnnnnnnnnnnnnnnnnnnnnnnnnnnnnnnnnnnnnnnnnnnnnnnnnnnnnnnnnnnnnnnnnnnnnnnnnnnnnnnnnnnnnnnnnnnnnnnnnnnnnnnnnnnnnnnnnnnnnnnnnnnnnnnnnnnnnnnnnnnnnnnnnnnnnnnnnnnnnnnnnnnnnnnnnnnnnnnnnnnnnnnnnnnnnnnnnnnnnnnnnnnnnnnnnnnnnnnnnnnnnnnnnnnnnnnnnnnnnnnnnnnnnnnnnnnnnnnnnnnnnnnnnnnnnnnnnnnnnnnnnnnnnnnnnnnnnnnnnnnnnnnnnnnnnnnnnnnnnnnnnnnnnnnnnnnnnnnnnnnnnnnnnnnnnnnnnnnnnnnnnnnnnnnnnnnnnnnnnnnnnnnnnnnnnnnnnnnnnnnnnnnnnnnnnnnnnnnnnnnnnnnnnnnnnnnnnnnnnnnnnnnnnnnnnnnnnnnnnnnnnnnnnnnnnnnnnnnnnnnnnnnnnnnnnnnnnnnnnnnnnnnnnnnnnnnnnnnnnnnnnnnnnnnnnnnnnnnnnnnnnnnnnnnnnnnnnnnnnnnnnnnnnnnnnnnnnnnnnnnnnnnnnnnnnnnnnnnnnnnnnnnnnnnnnnnnnnnnnnnnnnnnnnnnnnnnnnnnnnnnnnnnnnnnnnnnnnnnnnnnnnnnnnnnnnnnnnnnnnnnnnnnnnnnnnnnnnnnnnnnnnnnnnnnnnnnnnnnnnnnnnnnnnnnnnnnnnnnnnnnnnnnnnnnnnnnnnnnnnnnnnnnnnnnnnnnnnnnnnnnnnnnnnnnnnnnnnnnnnnnnnnnnnnnnnnnnnnnnnnnnnnnnnnnnnnnnnnnnnnnnnnnnnnnnnnnnnnnnnnnnnnnnnnnnnnnnnnnnnnnnnnnnnnnnnnnnnnnnnnnnnnnnnnnnnnnnnnnnnnnnnnnnnnnnnnnnnnnnnnnnnnnnnnnnnnnnnnnnnnnnnnnnnnnnnnnnnnnnnnnnnnnnnnnnnnnnnnnnnnnnnnnnnnnnnnnnnnnnnnnnnnnnnnnnnnnnnnnnnnnnnnnnnnnnnnnnnnnnnnnnnnnnnnnnnnnnnnnnnnnnnnnnnnnnnnnnnnnnnnnnnnnnnnnnnnnnnnnnnnnnnnnnnnnnnnnnnnnnnnnnnnnnnnnnnnnnnnnnnnnnnnnnnnnnnnnnnnnnnnnnnnnnnnnnnnnnnnnnnnnnnnnnnnnnnnnnnnnnnnnnnnnnnnnnnnnnnnnnnnnnnnnnnnnnnnnnnnnnnnnnnnnnnnnnnnnnnnnnnnnnnnnnnnnnnnnnnnnnnnnnnnnnnnnnnnnnnnnnnnnnnnnnnnnnnnnnnnnnnnnnnnnnnnnnnnnnnnnnnnnnnnnnnnnnnnnnnnnnnnnnnnnnnnnnnnnnnnnnnnnnnnnnnnnnnnnnnnnnnnnnnnnnnnnnnnnnnnnnnnnnnnnnnnnnnnnnnnnnnnnnnnnnnnnnnnnnnnnnnnnnnnnnnnnnnnnnnnnnnnnnnnnnnnnnnnnnnnnnnnnnnnnnnnnnnnnnnnnnnnnnnnnnnnnnnnnnnnnnnnnnnnnnnnnnnnnnnnnnnnnnnnnnnnnnnnnnnnnnnnnnnnnnnnnnnnnnnnnnnnnnnnnnnnnnnnnnnnnnnnnnnnnnnnnnnnnnnnnnnnnnnnnnnnnnnnnnnnnnnnnnnnnnnnnnnnnnnnnnnnnnnnnnnnnnnnnnnnnnnnnnnnnnnnnnnnnnnnnnnnnnnnnnnnnnnnnnnnnnnnnnnnnnnnnnnnnnnnnnnnnnnnnnnnnnnnnnnnnnnnnnnnnnnnnnnnnnnnnnnnnnnnnnnnnnnnnnnnnnnnnnnnnnnnnnnnnnnnnnnnnnnnnnnnnnnnnnnnnnnnnnnnnnnnnnnnnnnnnnnnnnnnnnnnnnnnnnnnnnnnnnnnnnnnnnnnnnnnnnnnnnnnnnnnnnnnnnnnnnnnnnnnnnnnnnnnnnnnnnnnnnnnnnnnnnnnnnnnnnnnnnnnnnnnnnnnnnnnnnnnnnnnnnnnnnnnnnnnnnnnnnnnnnnnnnnnnnnnnnnnnnnnnnnnnnnnnnnnnnnnnnnnnnnnnnnnnnnnnnnnnnnnnnnnnnnnnnnnnnnnnnnnnnnnnnnnnnnnnnnnnnnnnnnnnnnnnnnnnnnnnnnnnnnnnnnnnnnnnnnnnnnnnnnnnnnnnnnnnnnnnnnnnnnnnnnnnnnnnnnnnnnnnnnnnnnnnnnnnnnnnnnnnnnnnnnnnnnnnnnnnnnnnnnnnnnnnnnnnnnnnnnnnnnnnnnnnnnnnnnnnnnnnnnnnnnnnnnnnnnnnnnnnnnnnnnnnnnnnnnnnnnnnnnnnnnnnnnnnnnnnnnnnnnnnnnnnnnnnnnnnnnnnnnnnnnnnnnnnnnnnnnnnnnnnnnnnnnnnnnnnnnnnnnnnnnnnnnnnnnnnnnnnnnnnnnnnnnnnnnnnnnnnnnnnnnnnnnnnnnnnnnnnnnnnnnnnnnnnnnnnnnnnnnnnnnnnnnnnnnnnnnnnnnnnnnnnnnnnnnnnnnnnnnnnnnnnnnnnnnnnnnnnnnnnnnnnnnnnnnnnnnnnnnnnnnnnnnnnnnnnnnnnnnnnnnnnnnnnnnnnnnnnnnnnnnnnnnnnnnnnnnnnnnnnnnnnnnnnnnnnnnnnnnnnnnnnnnnnnnnnnnnnnnnnnnnnnnnnnnnnnnnnnnnnnnnnnnnnnnnnnnnnnnnnnnnnnnnnnnnnnnnnnnnnnnnnnnnnnnnnnnnnnnnnnnnnnnnnnnnnnnnnnnnnnnnnnnnnnnnnnnnnnnnnnnnnnnnnnnnnnnnnnnnnnnnnnnnnnnnnnnnnnnnnnnnnnnnnnnnnnnnnnnnnnnnnnnnnnnnnnnnnnnnnnnnnnnnnnnnnnnnnnnnnnnnnnnnnnnnnnnnnnnnnnnnnnnnnnnnnnnnnnnnnnnnnnnnnnnnnnnnnnnnnnnnnnnnnnnnnnnnnnnnnnnnnnnnnnnnnnnnnnnnnnnnnnnnnnnnnnnnnnnnnnnnnnnnnnnnnnnnnnnnnnnnnnnnnnnnnnnnnnnnnnnnnnnnnnnnnnnnnnnnnnnnnnnnnnnnnnnnnnnnnnnnnnnnnnnnnnnnnnnnnnnnnnnnnnnnnnnnnnnnnnnnnnnnnnnnnnnnnnnnnnnnnnnnnnnnnnnnnnnnnnnnnnnnnnnnnnnnnnnnnnnnnnnnnnnnnnnnnnnnnnnnnnnnnnnnnnnnnnnnnnnnnnnnnnnnnnnnnnnnnnnnnnnnnnnnnnnnnnnnnnnnnnnnnnnnnnnnnnnnnnnnnnnnnnnnnnnnnnnnnnnnnnnnnnnnnnnnnnnnnnnnnnnnnnnnnnnnnnnnnnnnnnnnnnnnnnnnnnnnnnnnnnnnnnnnnnnnnnnnnnnnnnnnnnnnnnnnnnnnnnnnnnnnnnnnnnnnnnnnnnnnnnnnnnnnnnnnnnnnnnnnnnnnnnnnnnnnnnnnnnnnnnnnnnnnnnnnnnnnnnnnnnnnnnnnnnnnnnnnnnnnnnnnnnnnnnnnnnnnnnnnnnnnnnnnnnnnnnnnnnnnnnnnnnnnnnnnnnnnnnnnnnnnnnnnnnnnnnnnnnnnnnnnnnnnnnnnnnnnnnnnnnnnnnnnnnnnnnnnnnnnnnnnnnnnnnnnnnnnnnnnnnnnnnnnnnnnnnnnnnnnnnnnnnnnnnnnnnnnnnnnnnnnnnnnnnnnnnnnnnnnnnnnnnnnnnnnnnnnnnnnnnnnnnnnnnnnnnnnnnnnnnnnnnnnnnnnnnnnnnnnnnnnnnnnnnnnnnnnnnnnnnnnnnnnnnnnnnnnnnnnnnnnnnnnnnnnnnnnnnnnnnnnnnnnnnnnnnnnnnnnnnnnnnnnnnnnnnnnnnnnnnnnnnnnnnnnnnnnnnnnnnnnnnnnnnnnnnnnnnnnnnnnnnnnnnnnnnnnnnnnnnnnnnnnnnnnnnnnnnnnnnnnnnnnnnnnnnnnnnnnnnnnnnnnnnnnnnnnnnnnnnnnnnnnnnnnnnnnnnnnnnnnnnnnnnnnnnnnnnnnnnnnnnnnnnnnnnnnnnnnnnnnnnnnnnnnnnnnnnnnnnnnnnnnnnnnnnnnnnnnnnnnnnnnnnnnnnnnnnnnnnnnnnnnnnnnnnnnnnnnnnnnnnnnnnnnnnnnnnnnnnnnnnnnnnnnnnnnnnnnnnnnnnnnnnnnnnnnnnnnnnnnnnnnnnnnnnnnnnnnnnnnnnnnnnnnnnnnnnnnnnnnnnnnnnnnnnnnnnnnnnnnnnnnnnnnnnnnnnnnnnnnnnnnnnnnnnnnnnnnnnnnnnnnnnnnnnnnnnnnnnnnnnnnnnnnnnnnnnnnnnnnnnnnnnnnnnnnnnnnnnnnnnnnnnnnnnnnnnnnnnnnnnnnnnnnnnnnnnnnnnnnnnnnnnnnnnnnnnnnnnnnnnnnnnnnnnnnnnnnnnnnnnnnnnnnnnnnnnnnnnnnnnnnnnnnnnnnnnnnnnnnnnnnnnnnnnnnnnnnnnnnnnnnnnnnnnnnnnnnnnnnnnnnnnnnnnnnnnnnnnnnnnnnnnnnnnnnnnnnnnnnnnnnnnnnnnnnnnnnnnnnnnnnnnnnnnnnnnnnnnnnnnnnnnnnnnnnnnnnnnnnnnnnnnnnnnnnnnnnnnnnnnnnnnnnnnnnnnnnnnnnnnnnnnnnnnnnnnnnnnnnnnnnnnnnnnnnnnnnnnnnnnnnnnnnnnnnnnnnnnnnnnnnnnnnnnnnnnnnnnnnnnnnnnnnnnnnnnnnnnnnnnnnnnnnnnnnnnnnnnnnnnnnnnnnnnnnnnnnnnnnnnnnnnnnnnnnnnnnnnnnnnnnnnnnnnnnnnnnnnnnnnnnnnnnnnnnnnnnnnnnnnnnnnnnnnnnnnnnnnnnnnnnnnnnnnnnnnnnnnnnnnnnnnnnnnnnnnnnnnnnnnnnnnnnnnnnnnnnnnnnnnnnnnnnnnnnnnnnnnnnnnnnnnnnnnnnnnnnnnnnnnnnnnnnnnnnnnnnnnnnnnnnnnnnnnnnnnnnnnnnnnnnnnnnnnnnnnnnnnnnnnnnnnnnnnnnnnnnnnnnnnnnnnnnnnnnnnnnnnnnnnnnnnnnnnnnnnnnnnnnnnnnnnnnnnnnnnnnnnnnnnnnnnnnnnnnnnnnnnnnnnnnnnnnnnnnnnnnnnnnnnnnnnnnnnnnnnnnnnnnnnnnnnnnnnnnnnnnnnnnnnnnnnnnnnnnnnnnnnnnnnnnnnnnnnnnnnnnnnnnnnnnnnnnnnnnnnnnnnnnnnnnnnnnnnnnnnnnnnnnnnnnnnnnnnnnnnnnnnnnnnnnnnnnnnnnnnnnnnnnnnnnnnnnnnnnnnnnnnnnnnnnnnnnnnnnnnnnnnnnnnnnnnnnnnnnnnnnnnnnnnnnnnnnnnnnnnnnnnnnnnnnnnnnnnnnnnnnnnnnnnnnnnnnnnnnnnnnnnnnnnnnnnnnnnnnnnnnnnnnnnnnnnnnnnnnnnnnnnnnnnnnnnnnnnnnnnnnnnnnnnnnnnnnnnnnnnnnnnnnnnnnnnnnnnnnnnnnnnnnnnnnnnnnnnnnnnnnnnnnnnnnnnnnnnnnnnnnnnnnnnnnnnnnnnnnnnnnnnnnnnnnnnnnnnnnnnnnnnnnnnnnnnnnnnnnnnnnnnnnnnnnnnnnnnnnnnnnnnnnnnnnnnnnnnnnnnnnnnnnnnnnnnnnnnnnnnnnnnnnnnnnnnnnnnnnnnnnnnnnnnnnnnnnnnnnnnnnnnnnnnnnnnnnnnnnnnnnnnnnnnnnnnnnnnnnnnnnnnnnnnnnnnnnnnnnnnnnnnnnnnnnnnnnnnnnnnnnnnnnnnnnnnnnnnnnnnnnnnnnnnnnnnnnnnnnnnnnnnnnnnnnnnnnnnnnnnnnnnnnnnnnnnnnnnnnnnnnnnnnnnnnnnnnnnnnnnnnnnnnnnnnnnnnnnnnnnnnnnnnnnnnnnnnnnnnnnnnnnnnnnnnnnnnnnnnnnnnnnnnnnnnnnnnnnnnnnnnnnnnnnnnnnnnnnnnnnnnnnnnnnnnnnnnnnnnnnnnnnnnnnnnnnnnnnnnnnnnnnnnnnnnnnnnnnnnnnnnnnnnnnnnnnnnnnnnnnnnnnnnnnnnnnnnnnnnnnnnnnnnnnnnnnnnnnnnnnnnnnnnnnnnnnnnnnnnnnnnnnnnnnnnnnnnnnnnnnnnnnnnnnnnnnnnnnnnnnnnnnnnnnnnnnnnnnnnnnnnnnnnnnnnnnnnnnnnnnnnnnnnnnnnnnnnnnnnnnnnnnnnnnnnnnnnnnnnnnnnnnnnnnnnnnnnnnnnnnnnnnnnnnnnnnnnnnnnnnnnnnnnnnnnnnnnnnnnnnnnnnnnnnnnnnnnnnnnnnnnnnnnnnnnnnnnnnnnnnnnnnnnnnnnnnnnnnnnnnnnnnnnnnnnnnnnnnnnnnnnnnnnnnnnnnnnnnnnnnnnnnnnnnnnnnnnnnnnnnnnnnnnnnnnnnnnnnnnnnnnnnnnnnnnnnnnnnnnnnnnnnnnnnnnnnnnnnnnnnnnnnnnnnnnnnnnnnnnnnnnnnnnnnnnnnnnnnnnnnnnnnnnnnnnnnnnnnnnnnnnnnnnnnnnnnnnnnnnnnnnnnnnnnnnnnnnnnnnnnnnnnnnnnnnnnnnnnnnnnnnnnnnnnnnnnnnnnnnnnnnnnnnnnnnnnnnnnnnnnnnnnnnnnnnnnnnnnnnnnnnnnnnnnnnnnnnnnnnnnnnnnnnnnnnnnnnnnnnnnnnnnnnnnnnnnnnnnnnnnnnnnnnnnnnnnnnnnnnnnnnnnnnnnnnnnnnnnnnnnnnnnnnnnnnnnnnnnnnnnnnnnnnnnnnnnnnnnnnnnnnnnnnnnnnnnnnnnnnnnnnnnnnnnnnnnnnnnnnnnnnnnnnnnnnnnnnnnnnnnnnnnnnnnnnnnnnnnnnnnnnnnnnnnnnnnnnnnnnnnnnnnnnnnnnnnnnnnnnnnnnnnnnnnnnnnnnnnnnnnnnnnnnnnnnnnnnnnnnnnnnnnnnnnnnnnnnnnnnnnnnnnnnnnnnnnnnnnnnnnnnnnnnnnnnnnnnnnnnnnnnnnnnnnnnnnnnnnnnnnnnnnnnnnnnnnnnnnnnnnnnnnnnnnnnnnnnnnnnnnnnnnnnnnnnnnnnnnnnnnnnnnnnnnnnnnnnnnnnnnnnnnnnnnnnnnnnnnnnnnnnnnnnnnnnnnnnnnnnnnnnnnnnnnnnnnnnnnnnnnnnnnnnnnnnnnnnnnnnnnnnnnnnnnnnnnnnnnnnnnnnnnnnnnnnnnnnnnnnnnnnnnnnnnnnnnnnnnnnnnnnnnnnnnnnnnnnnnnnnnnnnnnnnnnnnnnnnnnnnnnnnnnnnnnnnnnnnnnnnnnnnnnnnnnnnnnnnnnnnnnnnnnnnnnnnnnnnnnnnnnnnnnnnnnnnnnnnnnnnnnnnnnnnnnnnnnnnnnnnnnnnnnnnnnnnnnnnnnnnnnnnnnnnnnnnnnnnnnnnnnnnnnnnnnnnnnnnnnnnnnnnnnnnnnnnnnnnnnnnnnnnnnnnnnnnnnnnnnnnnnnnnnnnnnnnnnnnnnnnnnnnnnnnnnnnnnnnnnnnnnnnnnnnnnnnnnnnnnnnnnnnnnnnnnnnnnnnnnnnnnnnnnnnnnnnnnnnnnnnnnnnnnnnnnnnnnnnnnnnnnnnnnnnnnnnnnnnnnnnnnnnnnnnnnnnnnnnnnnnnnnnnnnnnnnnnnnnnnnnnnnnnnnnnnnnnnnnnnnnnnnnnnnnnnnnnnnnnnnnnnnnnnnnnnnnnnnnnnnnnnnnnnnnnnnnnnnnnnnnnnnnnnnnnnnnnnnnnnnnnnnnnnnnnnnnnnnnnnnnnnnnnnnnnnnnnnnnnnnnnnnnnnnnnnnnnnnnnnnnnnnnnnnnnnnnnnnnnnnnnnnnnnnnnnnnnnnnnnnnnnnnnnnnnnnnnnnnnnnnnnnnnnnnnnnnnnnnnnnnnnnnnnnnnnnnnnnnnnnnnnnnnnnnnnnnnnnnnnnnnnnnnnnnnnnnnnnnnnnnnnnnnnnnnnnnnnnnnnnnnnnnnnnnnnnnnnnnnnnnnnnnnnnnnnnnnnnnnnnnnnnnnnnnnnnnnnnnnnnnnnnnnnnnnnnnnnnnnnnnnnnnnnnnnnnnnnnnnnnnnnnnnnnnnnnnnnnnnnnnnnnnnnnnnnnnnnnnnnnnnnnnnnnnnnnnnnnnnnnnnnnnnnnnnnnnnnnnnnnnnnnnnnnnnnnnnnnnnnnnnnnnnnnnnnnnnnnnnnnnnnnnnnnnnnnnnnnnnnnnnnnnnnnnnnnnnnnnnnnnnnnnnnnnnnnnnnnnnnnnnnnnnnnnnnnnnnnnnnnnnnnnnnnnnnnnnnnnnnnnnnnnnnnnnnnnnnnnnnnnnnnnnnnnnnnnnnnnnnnnnnnnnnnnnnnnnnnnnnnnnnnnnnnnnnnnnnnnnnnnnnnnnnnnnnnnnnnnnnnnnnnnnnnnnnnnnnnnnnnnnnnnnnnnnnnnnnnnnnnnnnnnnnnnnnnnnnnnnnnnnnnnnnnnnnnnnnnnnnnnnnnnnnnnnnnnnnnnnnnnnnnnnnnnnnnnnnnnnnnnnnnnnnnnnnnnnnnnnnnnnnnnnnnnnnnnnnnnnnnnnnnnnnnnnnnnnnnnnnnnnnnnnnnnnnnnnnnnnnnnnnnnnnnnnnnnnnnnnnnnnnnnnnnnnnnnnnnnnnnnnnnnnnnnnnnnnnnnnnnnnnnnnnnnnnnnnnnnnnnnnnnnnnnnnnnnnnnnnnnnnnnnnnnnnnnnnnnnnnnnnnnnnnnnnnnnnnnnnnnnnnnnnnnnnnnnnnnnnnnnnnnnnnnnnnnnnnnnnnnnnnnnnnnnnnnnnnnnnnnnnnnnnnnnnnnnnnnnnnnnnnnnnnnnnnnnnnnnnnnnnnnnnnnnnnnnnnnnnnnnnnnnnnnnnnnnnnnnnnnnnnnnnnnnnnnnnnnnnnnnnnnnnnnnnnnnnnnnnnnnnnnnnnnnnnnnnnnnnnnnnnnnnnnnnnnnnnnnnnnnnnnnnnnnnnnnnnnnnnnnnnnnnnnnnnnnnnnnnnnnnnnnnnnnnnnnnnnnnnnnnnnnnnnnnnnnnnnnnnnnnnnnnnnnnnnnnnnnnnnnnnnnnnnnnnnnnnnnnnnnnnnnnnnnnnnnnnnnnnnnnnnnnnnnnnnnnnnnnnnnnnnnnnnnnnnnnnnnnnnnnnnnnnnnnnnnnnnnnnnnnnnnnnnnnnnnnnnnnnnnnnnnnnnnnnnnnnnnnnnnnnnnnnnnnnnnnnnnnnnnnnnnnnnnnnnnnnnnnnnnnnnnnnnnnnnnnnnnnnnnnnnnnnnnnnnnnnnnnnnnnnnnnnnnnnnnnnnnnnnnnnnnnnnnnnnnnnnnnnnnnnnnnnnnnnnnnnnnnnnnnnnnnnnnnnnnnnnnnnnnnnnnnnnnnnnnnnnnnnnnnnnnnnnnnnnnnnnnnnnnnnnnnnnnnnnnnnnnnnnnnnnnnnnnnnnnnnnnnnnnnnnnnnnnnnnnnnnnnnnnnnnnnnnnnnnnnnnnnnnnnnnnnnnnnnnnnnnnnnnnnnnnnnnnnnnnnnnnnnnnnnnnnnnnnnnnnnnnnnnnnnnnnnnnnnnnnnnnnnnnnnnnnnnnnnnnnnnnnnnnnnnnnnnnnnnnnnnnnnnnnnnnnnnnnnnnnnnnnnnnnnnnnnnnnnnnnnnnnnnnnnnnnnnnnnnnnnnnnnnnnnnnnnnnnnnnnnnnnnnnnnnnnnnnnnnnnnnnnnnnnnnnnnnnnnnnnnnnnnnnnnnnnnnnnnnnnnnnnnnnnnnnnnnnnnnnnnnnnnnnnnnnnnnnnnnnnnnnnnnnnnnnnnnnnnnnnnnnnnnnnnnnnnnnnnnnnnnnnnnnnnnnnnnnnnnnnnnnnnnnnnnnnnnnnnnnnnnnnnnnnnnnnnnnnnnnnnnnnnnnnnnnnnnnnnnnnnnnnnnnnnnnnnnnnnnnnnnnnnnnnnnnnnnnnnnnnnnnnnnnnnnnnnnnnnnnnnnnnnnnnnnnnnnnnnnnnnnnnnnnnnnnnnnnnnnnnnnnnnnnnnnnnnnnnnnnnnnnnnnnnnnnnnnnnnnnnnnnnnnnnnnnnnnnnnnnnnnnnnnnnnnnnnnnnnnnnnnnnnnnnnnnnnnnnnnnnnnnnnnnnnnnnnnnnnnnnnnnnnnnnnnnnnnnnnnnnnnnnnnnnnnnnnnnnnnnnnnnnnnnnnnnnnnnnnnnnnnnnnnnnnnnnnnnnnnnnnnnnnnnnnnnnnnnnnnnnnnnnnnnnnnnnnnnnnnnnnnnnnnnnnnnnnnnnnnnnnnnnnnnnnnnnnnnnnnnnnnnnnnnnnnnnnnnnnnnnnnnnnnnnnnnnnnnnnnnnnnnnnnnnnnnnnnnnnnnnnnnnnnnnnnnnnnnnnnnnnnnnnnnnnnnnnnnnnnnnnnnnnnnnnnnnnnnnnnnnnnnnnnnnnnnnnnnnnnnnnnnnnnnnnnnnnnnnnnnnnnnnnnnnnnnnnnnnnnnnnnnnnnnnnnnnnnnnnnnnnnnnnnnnnnnnnnnnnnnnnnnnnnnnnnnnnnnnnnnnnnnnnnnnnnnnnnnnnnnnnnnnnnnnnnnnnnnnnnnnnnnnnnnnnnnnnnnnnnnnnnnnnnnnnnnnnnnnnnnnnnnnnnnnnnnnnnnnnnnnnnnnnnnnnnnnnnnnnnnnnnnnnnnnnnnnnnnnnnnnnnnnnnnnnnnnnnnnnnnnnnnnnnnnnnnnnnnnnnnnnnnnnnnnnnnnnnnnnnnnnnnnnnnnnnnnnnnnnnnnnnnnnnnnnnnnnnnnnnnnnnnnnnnnnnnnnnnnnnnnnnnnnnnnnnnnnnnnnnnnnnnnnnnnnnnnnnnnnnnnnnnnnnnnnnnnnnnnnnnnnnnnnnnnnnnnnnnnnnnnnnnnnnnnnnnnnnnnnnnnnnnnnnnnnnnnnnnnnnnnnnnnnnnnnnnnnnnnnnnnnnnnnnnnnnnnnnnnnnnnnnnnnnnnnnnnnnnnnnnnnnnnnnnnnnnnnnnnnnnnnnnnnnnnnnnnnnnnnnnnnnnnnnnnnnnnnnnnnnnnnnnnnnnnnnnnnnnnnnnnnnnnnnnnnnnnnnnnnnnnnnnnnnnnnnnnnnnnnnnnnnnnnnnnnnnnnnnnnnnnnnnnnnnnnnnnnnnnnnnnnnnnnnnnnnnnnnnnnnnnnnnnnnnnnnnnnnnnnnnnnnnnnnnnnnnnnnnnnnnnnnnnnnnnnnnnnnnnnnnnnnnnnnnnnnnnnnnnnnnnnnnnnnnnnnnnnnnnnnnnnnnnnnnnnnnnnnnnnnnnnnnnnnnnnnnnnnnnnnnnnnnnnnnnnnnnnnnnnnnnnnnnnnnnnnnnnnnnnnnnnnnnnnnnnnnnnnnnnnnnnnnnnnnnnnnnnnnnnnnnnnnnnnnnnnnnnnnnnnnnnnnnnnnnnnnnnnnnnnnnnnnnnnnnnnnnnnnnnnnnnnnnnnnnnnnnnnnnnnnnnnnnnnnnnnnnnnnnnnnnnnnnnnnnnnnnnnnnnnnnnnnnnnnnnnnnnnnnnnnnnnnnnnnnnnnnnnnnnnnnnnnnnnnnnnnnnnnnnnnnnnnnnnnnnnnnnnnnnnnnnnnnnnnnnnnnnnnnnnnnnnnnnnnnnnnnnnnnnnnnnnnnnnnnnnnnnnnnnnnnnnnnnnnnnnnnnnnnnnnnnnnnnnnnnnnnnnnnnnnnnnnnnnnnnnnnnnnnnnnnnnnnnnnnnnnnnnnnnnnnnnnnnnnnnnnnnnnnnnnnnnnnnnnnnnnnnnnnnnnnnnnnnnnnnnnnnnnnnnnnnnnnnnnnnnnnnnnnnnnnnnnnnnnnnnnnnnnnnnnnnnnnnnnnnnnnnnnnnnnnnnnnnnnnnnnnnnnnnnnnnnnnnnnnnnnnnnnnnnnnnnnnnnnnnnnnnnnnnnnnnnnnnnnnnnnnnnnnnnnnnnnnnnnnnnnnnnnnnnnnnnnnnnnnnnnnnnnnnnnnnnnnnnnnnnnnnnnnnnnnnnnnnnnnnnnnnnnnnnnnnnnnnnnnnnnnnnnnnnnnnnnnnnnnnnnnnnnnnnnnnnnnnnnnnnnnnnnnnnnnnnnnnnnnnnnnnnnnnnnnnnnnnnnnnnnnnnnnnnnnnnnnnnnnnnnnnnnnnnnnnnnnnnnnnnnnnnnnnnnnnnnnnnnnnnnnnnnnnnnnnnnnnnnnnnnnnnnnnnnnnnnnnnnnnnnnnnnnnnnnnnnnnnnnnnnnnnnnnnnnnnnnnnnnnnnnnnnnnnnnnnnnnnnnnnnnnnnnnnnnnnnnnnnnnnnnnnnnnnnnnnnnnnnnnnnnnnnnnnnnnnnnnnnnnnnnnnnnnnnnnnnnnnnnnnnnnnnnnnnnnnnnnnnnnnnnnnnnnnnnnnnnnnnnnnnnnnnnnnnnnnnnnnnnnnnnnnnnnnnnnnnnnnnnnnnnnnnnnnnnnnnnnnnnnnnnnnnnnnnnnnnnnnnnnnnnnnnnnnnnnnnnnnnnnnnnnnnnnnnnnnnnnnnnnnnnnnnnnnnnnnnnnnnnnnnnnnnnnnnnnnnnnnnnnnnnnnnnnnnnnnnnnnnnnnnnnnnnnnnnnnnnnnnnnnnnnnnnnnnnnnnnnnnnnnnnnnnnnnnnnnnnnnnnnnnnnnnnnnnnnnnnnnnnnnnnnnnnnnnnnnnnnnnnnnnnnnnnnnnnnnnnnnnnnnnnnnnnnnnnnnnnnnnnnnnnnnnnnnnnnnnnnnnnnnnnnnnnnnnnnnnnnnnnnnnnnnnnnnnnnnnnnnnnnnnnnnnnnnnnnnnnnnnnnnnnnnnnnnnnnnnnnnnnnnnnnnnnnnnnnnnnnnnnnnnnnnnnnnnnnnnnnnnnnnnnnnnnnnnnnnnnnnnnnnnnnnnnnnnnnnnnnnnnnnnnnnnnnnnnnnnnnnnnnnnnnnnnnnnnnnnnnnnnnnnnnnnnnnnnnnnnnnnnnnnnnnnnnnnnnnnnnnnnnnnnnnnnnnnnnnnnnnnnnnnnnnnnnnnnnnnnnnnnnnnnnnnnnnnnnnnnnnnnnnnnnnnnnnnnnnnnnnnnnnnnnnnnnnnnnnnnnnnnnnnnnnnnnnnnnnnnnnnnnnnnnnnnnnnnnnnnnnnnnnnnnnnnnnnnnnnnnnnnnnnnnnnnnnnnnnnnnnnnnnnnnnnnnnnnnnnnnnnnnnnnnnnnnnnnnnnnnnnnnnnnnnnnnnnnnnnnnnnnnnnnnnnnnnnnnnnnnnnnnnnnnnnnnnnnnnnnnnnnnnnnnnnnnnnnnnnnnnnnnnnnnnnnnnnnnnnnnnnnnnnnnnnnnnnnnnnnnnnnnnnnnnnnnnnnnnnnnnnnnnnnnnnnnnnnnnnnnnnnnnnnnnnnnnnnnnnnnnnnnnnnnnnnnnnnnnnnnnnnnnnnnnnnnnnnnnnnnnnnnnnnnnnnnnnnnnnnnnnnnnnnnnnnnnnnnnnnnnnnnnnnnnnnnnnnnnnnnnnnnnnnnnnnnnnnnnnnnnnnnnnnnnnnnnnnnnnnnnnnnnnnnnnnnnnnnnnnnnnnnnnnnnnnnnnnnnnnnnnnnnnnnnnnnnnnnnnnnnnnnnnnnnnnnnnnnnnnnnnnnnnnnnnnnnnnnnnnnnnnnnnnnnnnnnnnnnnnnnnnnnnnnnnnnnnnnnnnnnnnnnnnnnnnnnnnnnnnnnnnnnnnnnnnnnnnnnnnnnnnnnnnnnnnnnnnnnnnnnnnnnnnnnnnnnnnnnnnnnnnnnnnnnnnnnnnnnnnnnnnnnnnnnnnnnnnnnnnnnnnnnnnnnnnnnnnnnnnnnnnnnnnnnnnnnnnnnnnnnnnnnnnnnnnnnnnnnnnnnnnnnnnnnnnnnnnnnnnnnnnnnnnnnnnnnnnnnnnnnnnnnnnnnnnnnnnnnnnnnnnnnnnnnnnnnnnnnnnnnnnnnnnnnnnnnnnnnnnnnnnnnnnnnnnnnnnnnnnnnnnnnnnnnnnnnnnnnnnnnnnnnnnnnnnnnnnnnnnnnnnnnnnnnnnnnnnnnnnnnnnnnnnnnnnnnnnnnnnnnnnnnnnnnnnnnnnnnnnnnnnnnnnnnnnnnnnnnnnnnnnnnnnnnnnnnnnnnnnnnnnnnnnnnnnnnnnnnnnnnnnnnnnnnnnnnnnnnnnnnnnnnnnnnnnnnnnnnnnnnnnnnnnnnnnnnnnnnnnnnnnnnnnnnnnnnnnnnnnnnnnnnnnnnnnnnnnnnnnnnnnnnnnnnnnnnnnnnnnnnnnnnnnnnnnnnnnnnnnnnnnnnnnnnnnnnnnnnnnnnnnnnnnnnnnnnnnnnnnnnnnnnnnnnnnnnnnnnnnnnnnnnnnnnnnnnnnnnnnnnnnnnnnnnnnnnnnnnnnnnnnnnnnnnnnnnnnnnnnnnnnnnnnnnnnnnnnnnnnnnnnnnnnnnnnnnnnnnnnnnnnnnnnnnnnnnnnnnnnnnnnnnnnnnnnnnnnnnnnnnnnnnnnnnnnnnnnnnnnnnnnnnnnnnnnnnnnnnnnnnnnnnnnnnnnnnnnnnnnnnnnnnnnnnnnnnnnnnnnnnnnnnnnnnnnnnnnnnnnnnnnnnnnnnnnnnnnnnnnnnnnnnnnnnnnnnnnnnnnnnnnnnnnnnnnnnnnnnnnnnnnnnnnnnnnnnnnnnnnnnnnnnnnnnnnnnnnnnnnnnnnnnnnnnnnnnnnnnnnnnnnnnnnnnnnnnnnnnnnnnnnnnnnnnnnnnnnnnnnnnnnnnnnnnnnnnnnnnnnnnnnnnnnnnnnnnnnnnnnnnnnnnnnnnnnnnnnnnnnnnnnnnnnnnnnnnnnnnnnnnnnnnnnnnnnnnnnnnnnnnnnnnnnnnnnnnnnnnnnnnnnnnnnnnnnnnnnnnnnnnnnnnnnnnnnnnnnnnnnnnnnnnnnnnnnnnnnnnnnnnnnnnnnnnnnnnnnnnnnnnnnnnnnnnnnnnnnnnnnnnnnnnnnnnnnnnnnnnnnnnnnnnnnnnnnnnnnnnnnnnnnnnnnnnnnnnnnnnnnnnnnnnnnnnnnnnnnnnnnnnnnnnnnnnnnnnnnnnnnnnnnnnnnnnnnnnnnnnnnnnnnnnnnnnnnnnnnnnnnnnnnnnnnnnnnnnnnnnnnnnnnnnnnnnnnnnnnnnnnnnnnnnnnnnnnnnnnnnnnnnnnnnnnnnnnnnnnnnnnnnnnnnnnnnnnnnnnnnnnnnnnnnnnnnnnnnnnnnnnnnnnnnnnnnnnnnnnnnnnnnnnnnnnnnnnnnnnnnnnnnnnnnnnnnnnnnnnnnnnnnnnnnnnnnnnnnnnnnnnnnnnnnnnnnnnnnnnnnnnnnnnnnnnnnnnnnnnnnnnnnnnnnnnnnnnnnnnnnnnnnnnnnnnnnnnnnnnnnnnnnnnnnnnnnnnnnnnnnnnnnnnnnnnnnnnnnnnnnnnnnnnnnnnnnnnnnnnnnnnnnnnnnnnnnnnnnnnnnnnnnnnnnnnnnnnnnnnnnnnnnnnnnnnnnnnnnnnnnnnnnnnnnnnnnnnnnnnnnnnnnnnnnnnnnnnnnnnnnnnnnnnnnnnnnnnnnnnnnnnnnnnnnnnnnnnnnnnnnnnnnnnnnnnnnnnnnnnnnnnnnnnnnnnnnnnnnnnnnnnnnnnnnnnnnnnnnnnnnnnnnnnnnnnnnnnnnnnnnnnnnnnnnnnnnnnnnnnnnnnnnnnnnnnnnnnnnnnnnnnnnnnnnnnnnnnnnnnnnnnnnnnnnnnnnnnnnnnnnnnnnnnnnnnnnnnnnnnnnnnnnnnnnnnnnnnnnnnnnnnnnnnnnnnnnnnnnnnnnnnnnnnnnnnnnnnnnnnnnnnnnnnnnnnnnnnnnnnnnnnnnnnnnnnnnnnnnnnnnnnnnnnnnnnnnnnnnnnnnnnnnnnnnnnnnnnnnnnnnnnnnnnnnnnnnnnnnnnnnnnnnnnnnnnnnnnnnnnnnnnnnnnnnnnnnnnnnnnnnnnnnnnnnnnnnnnnnnnnnnnnnnnnnnnnnnnnnnnnnnnnnnnnnnnnnnnnnnnnnnnnnnnnnnnnnnnnnnnnnnnnnnnnnnnnnnnnnnnnnnnnnnnnnnnnnnnnnnnnnnnnnnnnnnnnnnnnnnnnnnnnnnnnnnnnnnnnnnnnnnnnnnnnnnnnnnnnnnnnnnnnnnnnnnnnnnnnnnnnnnnnnnnnnnnnnnnnnnnnnnnnnnnnnnnnnnnnnnnnnnnnnnnnnnnnnnnnnnnnnnnnnnnnnnnnnnnnnnnnnnnnnnnnnnnnnnnnnnnnnnnnnnnnnnnnnnnnnnnnnnnnnnnnnnnnnnnnnnnnnnnnnnnnnnnnnnnnnnnnnnnnnnnnnnnnnnnnnnnnnnnnnnnnnnnnnnnnnnnnnnnnnnnnnnnnnnnnnnnnnnnnnnnnnnnnnnnnnnnnnnnnnnnnnnnnnnnnnnnnnnnnnnnnnnnnnnnnnnnnnnnnnnnnnnnnnnnnnnnnnnnnnnnnnnnnnnnnnnnnnnnnnnnnnnnnnnnnnnnnnnnnnnnnnnnnnnnnnnnnnnnnnnnnnnnnnnnnnnnnnnnnnnnnnnnnnnnnnnnnnnnnnnnnnnnnnnnnnnnnnnnnnnnnnnnnnnnnnnnnnnnnnnnnnnnnnnnnnnnnnnnnnnnnnnnnnnnnnnnnnnnnnnnnnnnnnnnnnnnnnnnnnnnnnnnnnnnnnnnnnnnnnnnnnnnnnnnnnnnnnnnnnnnnnnnnnnnnnnnnnnnnnnnnnnnnnnnnnnnnnnnnnnnnnnnnnnnnnnnnnnnnnnnnnnnnnnnnnnnnnnnnnnnnnnnnnnnnnnnnnnnnnnnnnnnnnnnnnnnnnnnnnnnnnnnnnnnnnnnnnnnnnnnnnnnnnnnnnnnnnnnnnnnnnnnnnnnnnnnnnnnnnnnnnnnnnnnnnnnnnnnnnnnnnnnnnnnnnnnnnnnnnnnnnnnnnnnnnnnnnnnnnnnnnnnnnnnnnnnnnnnnnnnnnnnnnnnnnnnnnnnnnnnnnnnnnnnnnnnnnnnnnnnnnnnnnnnnnnnnnnnnnnnnnnnnnnnnnnnnnnnnnnnnnnnnnnnnnnnnnnnnnnnnnnnnnnnnnnnnnnnnnnnnnnnnnnnnnnnnnnnnnnnnnnnnnnnnnnnnnnnnnnnnnnnnnnnnnnnnnnnnnnnnnnnnnnnnnnnnnnnnnnnnnnnnnnnnnnnnnnnnnnnnnnnnnnnnnnnnnnnnnnnnnnnnnnnnnnnnnnnnnnnnnnnnnnnnnnnnnnnnnnnnnnnnnnnnnnnnnnnnnnnnnnnnnnnnnnnnnnnnnnnnnnnnnnnnnnnnnnnnnnnnnnnnnnnnnnnnnnnnnnnnnnnnnnnnnnnnnnnnnnnnnnnnnnnnnnnnnnnnnnnnnnnnnnnnnnnnnnnnnnnnnnnnnnnnnnnnnnnnnnnnnnnnnnnnnnnnnnnnnnnnnnnnnnnnnnnnnnnnnnnnnnnnnnnnnnnnnnnnnnnnnnnnnnnnnnnnnnnnnnnnnnnnnnnnnnnnnnnnnnnnnnnnnnnnnnnnnnnnnnnnnnnnnnnnnnnnnnnnnnnnnnnnnnnnnnnnnnnnnnnnnnnnnnnnnnnnnnnnnnnnnnnnnnnnnnnnnnnnnnnnnnnnnnnnnnnnnnnnnnnnnnnnnnnnnnnnnnnnnnnnnnnnnnnnnnnnnnnnnnnnnnnnnnnnnnnnnnnnnnnnnnnnnnnnnnnnnnnnnnnnnnnnnnnnnnnnnnnnnnnnnnnnnnnnnnnnnnnnnnnnnnnnnnnnnnnnnnnnnnnnnnnnnnnnnnnnnnnnnnnnnnnnnnnnnnnnnnnnnnnnnnnnnnnnnnnnnnnnnnnnnnnnnnnnnnnnnnnnnnnnnnnnnnnnnnnnnnnnnnnnnnnnnnnnnnnnnnnnnnnnnnnnnnnnnnnnnnnnnnnnnnnnnnnnnnnnnnnnnnnnnnnnnnnnnnnnnnnnnnnnnnnnnnnnnnnnnnnnnnnnnnnnnnnnnnnnnnnnnnnnnnnnnnnnnnnnnnnnnnnnnnnnnnnnnnnnnnnnnnnnnnnnnnnnnnnnnnnnnnnnnnnnnnnnnnnnnnnnnnnnnnnnnnnnnnnnnnnnnnnnnnnnnnnnnnnnnnnnnnnnnnnnnnnnnnnnnnnnnnnnnnnnnnnnnnnnnnnnnnnnnnnnnnnnnnnnnnnnnnnnnnnnnnnnnnnnnnnnnnnnnnnnnnnnnnnnnnnnnnnnnnnnnnnnnnnnnnnnnnnnnnnnnnnnnnnnnnnnnnnnnnnnnnnnnnnnnnnnnnnnnnnnnnnnnnnnnnnnnnnnnnnnnnnnnnnnnnnnnnnnnnnnnnnnnnnnnnnnnnnnnnnnnnnnnnnnnnnnnnnnnnnnnnnnnnnnnnnnnnnnnnnnnnnnnnnnnnnnnnnnnnnnnnnnnnnnnnnnnnnnnnnnnnnnnnnnnnnnnnnnnnnnnnnnnnnnnnnnnnnnnnnnnnnnnnnnnnnnnnnnnnnnnnnnnnnnnnnnnnnnnnnnnnnnnnnnnnnnnnnnnnnnnnnnnnnnnnnnnnnnnnnnnnnnnnnnnnnnnnnnnnnnnnnnnnnnnnnnnnnnnnnnnnnnnnnnnnnnnnnnnnnnnnnnnnnnnnnnnnnnnnnnnnnnnnnnnnnnnnnnnnnnnnnnnnnnnnnnnnnnnnnnnnnnnnnnnnnnnnnnnnnnnnnnnnnnnnnnnnnnnnnnnnnnnnnnnnnnnnnnnnnnnnnnnnnnnnnnnnnnnnnnnnnnnnnnnnnnnnnnnnnnnnnnnnnnnnnnnnnnnnnnnnnnnnnnnnnnnnnnnnnnnnnnnnnnnnnnnnnnnnnnnnnnnnnnnnnnnnnnnnnnnnnnnnnnnnnnnnnnnnnnnnnnnnnnnnnnnnnnnnnnnnnnnnnnnnnnnnnnnnnnnnnnnnnnnnnnnnnnnnnnnnnnnnnnnnnnnnnnnnnnnnnnnnnnnnnnnnnnnnnnnnnnnnnnnnnnnnnnnnnnnnnnnnnnnnnnnnnnnnnnnnnnnnnnnnnnnnnnnnnnnnnnnnnnnnnnnnnnnnnnnnnnnnnnnnnnnnnnnnnnnnnnnnnnnnnnnnnnnnnnnnnnnnnnnnnnnnnnnnnnnnnnnnnnnnnnnnnnnnnnnnnnnnnnnnnnnnnnnnnnnnnnnnnnnnnnnnnnnnnnnnnnnnnnnnnnnnnnnnnnnnnnnnnnnnnnnnnnnnnnnnnnnnnnnnnnnnnnnnnnnnnnnnnnnnnnnnnnnnnnnnnnnnnnnnnnnnnnnnnnnnnnnnnnnnnnnnnnnnnnnnnnnnnnnnnnnnnnnnnnnnnnnnnnnnnnnnnnnnnnnnnnnnnnnnnnnnnnnnnnnnnnnnnnnnnnnnnnnnnnnnnnnnnnnnnnnnnnnnnnnnnnnnnnnnnnnnnnnnnnnnnnnnnnnnnnnnnnnnnnnnnnnnnnnnnnnnnnnnnnnnnnnnnnnnnnnnnnnnnnnnnnnnnnnnnnnnnnnnnnnnnnnnnnnnnnnnnnnnnnnnnnnnnnnnnnnnnnnnnnnnnnnnnnnnnnnnnnnnnnnnnnnnnnnnnnnnnnnnnnnnnnnnnnnnnnnnnnnnnnnnnnnnnnnnnnnnnnnnnnnnnnnnnnnnnnnnnnnnnnnnnnnnnnnnnnnnnnnnnnnnnnnnnnnnnnnnnnnnnnnnnnnnnnnnnnnnnnnnnnnnnnnnnnnnnnnnnnnnnnnnnnnnnnnnnnnnnnnnnnnnnnnnnnnnnnnnnnnnnnnnnnnnnnnnnnnnnnnnnnnnnnnnnnnnnnnnnnnnnnnnnnnnnnnnnnnnnnnnnnnnnnnnnnnnnnnnnnnnnnnnnnnnnnnnnnnnnnnnnnnnnnnnnnnnnnnnnnnnnnnnnnnnnnnnnnnnnnnnnnnnnnnnnnnnnnnnnnnnnnnnnnnnnnnnnnnnnnnnnnnnnnnnnnnnnnnnnnnnnnnnnnnnnnnnnnnnnnnnnnnnnnnnnnnnnnnnnnnnnnnnnnnnnnnnnnnnnnnnnnnnnnnnnnnnnnnnnnnnnnnnnnnnnnnnnnnnnnnnnnnnnnnnnnnnnnnnnnnnnnnnnnnnnnnnnnnnnnnnnnnnnnnnnnnnnnnnnnnnnnnnnnnnnnnnnnnnnnnnnnnnnnnnnnnnnnnnnnnnnnnnnnnnnnnnnnnnnnnnnnnnnnnnnnnnnnnnnnnnnnnnnnnnnnnnnnnnnnnnnnnnnnnnnnnnnnnnnnnnnnnnnnnnnnnnnnnnnnnnnnnnnnnnnnnnnnnnnnnnnnnnnnnnnnnnnnnnnnnnnnnnnnnnnnnnnnnnnnnnnnnnnnnnnnnnnnnnnnnnnnnnnnnnnnnnnnnnnnnnnnnnnnnnnnnnnnnnnnnnnnnnnnnnnnnnnnnnnnnnnnnnnnnnnnnnnnnnnnnnnnnnnnnnnnnnnnnnnnnnnnnnnnnnnnnnnnnnnnnnnnnnnnnnnnnnnnnnnnnnnnnnnnnnnnnnnnnnnnnnnnnnnnnnnnnnnnnnnnnnnnnnnnnnnnnnnnnnnnnnnnnnnnnnnnnnnnnnnnnnnnnnnnnnnnnnnnnnnnnnnnnnnnnnnnnnnnnnnnnnnnnnnnnnnnnnnnnnnnnnnnnnnnnnnnnnnnnnnnnnnnnnnnnnnnnnnnnnnnnnnnnnnnnnnnnnnnnnnnnnnnnnnnnnnnnnnnnnnnnnnnnnnnnnnnnnnnnnnnnnnnnnnnnnnnnnnnnnnnnnnnnnnnnnnnnnnnnnnnnnnnnnnnnnnnnnnnnnnnnnnnnnnnnnnnnnnnnnnnnnnnnnnnnnnnnnnnnnnnnnnnnnnnnnnnnnnnnnnnnnnnnnnnnnnnnnnnnnnnnnnnnnnnnnnnnnnnnnnnnnnnnnnnnnnnnnnnnnnnnnnnnnnnnnnnnnnnnnnnnnnnnnnnnnnnnnnnnnnnnnnnnnnnnnnnnnnnnnnnnnnnnnnnnnnnnnnnnnnnnnnnnnnnnnnnnnnnnnnnnnnnnnnnnnnnnnnnnnnnnnnnnnnnnnnnnnnnnnnnnnnnnnnnnnnnnnnnnnnnnnnnnnnnnnnnnnnnnnnnnnnnnnnnnnnnnnnnnnnnnnnnnnnnnnnnnnnnnnnnnnnnnnnnnnnnnnnnnnnnnnnnnnnnnnnnnnnnnnnnnnnnnnnnnnnnnnnnnnnnnnnnnnnnnnnnnnnnnnnnnnnnnnnnnnnnnnnnnnnnnnnnnnnnnnnnnnnnnnnnnnnnnnnnnnnnnnnnnnnnnnnnnnnnnnnnnnnnnnnnnnnnnnnnnnnnnnnnnnnnnnnnnnnnnnnnnnnnnnnnnnnnnnnnnnnnnnnnnnnnnnnnnnnnnnnnnnnnnnnnnnnnnnnnnnnnnnnnnnnnnnnnnnnnnnnnnnnnnnnnnnnnnnnnnnnnnnnnnnnnnnnnnnnnnnnnnnnnnnnnnnnnnnnnnnnnnnnnnnnnnnnnnnnnnnnnnnnnnnnnnnnnnnnnnnnnnnnnnnnnnnnnnnnnnnnnnnnnnnnnnnnnnnnnnnnnnnnnnnnnnnnnnnnnnnnnnnnnnnnnnnnnnnnnnnnnnnnnnnnnnnnnnnnnnnnnnnnnnnnnnnnnnnnnnnnnnnnnnnnnnnnnnnnnnnnnnnnnnnnnnnnnnnnnnnnnnnnnnnnnnnnnnnnnnnnnnnnnnnnnnnnnnnnnnnnnnnnnnnnnnnnnnnnnnnnnnnnnnnnnnnnnnnnnnnnnnnnnnnnnnnnnnnnnnnnnnnnnnnnnnnnnnnnnnnnnnnnnnnnnnnnnnnnnnnnnnnnnnnnnnnnnnnnnnnnnnnnnnnnnnnnnnnnnnnnnnnnnnnnnnnnnnnnnnnnnnnnnnnnnnnnnnnnnnnnnnnnnnnnnnnnnnnnnnnnnnnnnnnnnnnnnnnnnnnnnnnnnnnnnnnnnnnnnnnnnnnnnnnnnnnnnnnnnnnnnnnnnnnnnnnnnnnnnnnnnnnnnnnnnnnnnnnnnnnnnnnnnnnnnnnnnnnnnnnnnnnnnnnnnnnnnnnnnnnnnnnnnnnnnnnnnnnnnnnnnnnnnnnnnnnnnnnnnnnnnnnnnnnnnnnnnnnnnnnnnnnnnnnnnnnnnnnnnnnnnnnnnnnnnnnnnnnnnnnnnnnnnnnnnnnnnnnnnnnnnnnnnnnnnnnnnnnnnnnnnnnnnnnnnnnnnnnnnnnnnnnnnnnnnnnnnnnnnnnnnnnnnnnnnnnnnnnnnnnnnnnnnnnnnnnnnnnnnnnnnnnnnnnnnnnnnnnnnnnnnnnnnnnnnnnnnnnnnnnnnnnnnnnnnnnnnnnnnnnnnnnnnnnnnnnnnnnnnnnnnnnnnnnnnnnnnnnnnnnnnnnnnnnnnnnnnnnnnnnnnnnnnnnnnnnnnnnnnnnnnnnnnnnnnnnnnnnnnnnnnnnnnnnnnnnnnnnnnnnnnnnnnnnnnnnnnnnnnnnnnnnnnnnnnnnnnnnnnnnnnnnnnnnnnnnnnnnnnnnnnnnnnnnnnnnnnnnnnnnnnnnnnnnnnnnnnnnnnnnnnnnnnnnnnnnnnnnnnnnnnnnnnnnnnnnnnnnnnnnnnnnnnnnnnnnnnnnnnnnnnnnnnnnnnnnnnnnnnnnnnnnnnnnnnnnnnnnnnnnnnnnnnnnnnnnnnnnnnnnnnnnnnnnnnnnnnnnnnnnnnnnnnnnnnnnnnnnnnnnnnnnnnnnnnnnnnnnnnnnnnnnnnnnnnnnnnnnnnnnnnnnnnnnnnnnnnnnnnnnnnnnnnnnnnnnnnnnnnnnnnnnnnnnnnnnnnnnnnnnnnnnnnnnnnnnnnnnnnnnnnnnnnnnnnnnnnnnnnnnnnnnnnnnnnnnnnnnnnnnnnnnnnnnnnnnnnnnnnnnnnnnnnnnnnnnnnnnnnnnnnnnnnnnnnnnnnnnnnnnnnnnnnnnnnnnnnnnnnnnnnnnnnnnnnnnnnnnnnnnnnnnnnnnnnnnnnnnnnnnnnnnnnnnnnnnnnnnnnnnnnnnnnnnnnnnnnnnnnnnnnnnnnnnnnnnnnnnnnnnnnnnnnnnnnnnnnnnnnnnnnnnnnnnnnnnnnnnnnnnnnnnnnnnnnnnnnnnnnnnnnnnnnnnnnnnnnnnnnnnnnnnnnnnnnnnnnnnnnnnnnnnnnnnnnnnnnnnnnnnnnnnnnnnnnnnnnnnnnnnnnnnnnnnnnnnnnnnnnnnnnnnnnnnnnnnnnnnnnnnnnnnnnnnnnnnnnnnnnnnnnnnnnnnnnnnnnnnnnnnnnnnnnnnnnnnnnnnnnnnnnnnnnnnnnnnnnnnnnnnnnnnnnnnnnnnnnnnnnnnnnnnnnnnnnnnnnnnnnnnnnnnnnnnnnnnnnnnnnnnnnnnnnnnnnnnnnnnnnnnnnnnnnnnnnnnnnnnnnnnnnnnnnnnnnnnnnnnnnnnnnnnnnnnnnnnnnnnnnnnnnnnnnnnnnnnnnnnnnnnnnnnnnnnnnnnnnnnnnnnnnnnnnnnnnnnnnnnnnnnnnnnnnnnnnnnnnnnnnnnnnnnnnnnnnnnnnnnnnnnnnnnnnnnnnnnnnnnnnnnnnnnnnnnnnnnnnnnnnnnnnnnnnnnnnnnnnnnnnnnnnnnnnnnnnnnnnnnnnnnnnnnnnnnnnnnnnnnnnnnnnnnnnnnnnnnnnnnnnnnnnnnnnnnnnnnnnnnnnnnnnnnnnnnnnnnnnnnnnnnnnnnnnnnnnnnnnnnnnnnnnnnnnnnnnnnnnnnnnnnnnnnnnnnnnnnnnnnnnnnnnnnnnnnnnnnnnnnnnnnnnnnnnnnnnnnnnnnnnnnnnnnnnnnnnnnnnnnnnnnnnnnnnnnnnnnnnnnnnnnnnnnnnnnnnnnnnnnnnnnnnnnnnnnnnnnnnnnnnnnnnnnnnnnnnnnnnnnnnnnnnnnnnnnnnnnnnnnnnnnnnnnnnnnnnnnnnnnnnnnnnnnnnnnnnnnnnnnnnnnnnnnnnnnnnnnnnnnnnnnnnnnnnnnnnnnnnnnnnnnnnnnnnnnnnnnnnnnnnnnnnnnnnnnnnnnnnnnnnnnnnnnnnnnnnnnnnnnnnnnnnnnnnnnnnnnnnnnnnnnnnnnnnnnnnnnnnnnnnnnnnnnnnnnnnnnnnnnnnnnnnnnnnnnnnnnnnnnnnnnnnnnnnnnnnnnnnnnnnnnnnnnnnnnnnnnnnnnnnnnnnnnnnnnnnnnnnnnnnnnnnnnnnnnnnnnnnnnnnnnnnnnnnnnnnnnnnnnnnnnnnnnnnnnnnnnnnnnnnnnnnnnnnnnnnnnnnnnnnnnnnnnnnnnnnnnnnnnnnnnnnnnnnnnnnnnnnnnnnnnnnnnnnnnnnnnnnnnnnnnnnnnnnnnnnnnnnnnnnnnnnnnnnnnnnnnnnnnnnnnnnnnnnnnnnnnnnnnnnnnnnnnnnnnnnnnnnnnnnnnnnnnnnnnnnnnnnnnnnnnnnnnnnnnnnnnnnnnnnnnnnnnnnnnnnnnnnnnnnnnnnnnnnnnnnnnnnnnnnnnnnnnnnnnnnnnnnnnnnnnnnnnnnnnnnnnnnnnnnnnnnnnnnnnnnnnnnnnnnnnnnnnnnnnnnnnnnnnnnnnnnnnnnnnnnnnnnnnnnnnnnnnnnnnnnnnnnnnnnnnnnnnnnnnnnnnnnnnnnnnnnnnnnnnnnnnnnnnnnnnnnnnnnnnnnnnnnnnnnnnnnnnnnnnnnnnnnnnnnnnnnnnnnnnnnnnnnnnnnnnnnnnnnnnnnnnnnnnnnnnnnnnnnnnnnnnnnnnnnnnnnnnnnnnnnnnnnnnnnnnnnnnnnnnnnnnnnnnnnnnnnnnnnnnnnnnnnnnnnnnnnnnnnnnnnnnnnnnnnnnnnnnnnnnnnnnnnnnnnnnnnnnnnnnnnnnnnnnnnnnnnnnnnnnnnnnnnnnnnnnnnnnnnnnnnnnnnnnnnnnnnnnnnnnnnnnnnnnnnnnnnnnnnnnnnnnnnnnnnnnnnnnnnnnnnnnnnnnnnnnnnnnnnnnnnnnnnnnnnnnnnnnnnnnnnnnnnnnnnnnnnnnnnnnnnnnnnnnnnnnnnnnnnnnnnnnnnnnnnnnnnnnnnnnnnnnnnnnnnnnnnnnnnnnnnnnnnnnnnnnnnnnnnnnnnnnnnnnnnnnnnnnnnnnnnnnnnnnnnnnnnnnnnnnnnnnnnnnnnnnnnnnnnnnnnnnnnnnnnnnnnnnnnnnnnnnnnnnnnnnnnnnnnnnnnnnnnnnnnnnnnnnnnnnnnnnnnnnnnnnnnnnnnnnnnnnnnnnnnnnnnnnnnnnnnnnnnnnnnnnnnnnnnnnnnnnnnnnnnnnnnnnnnnnnnnnnnnnnnnnnnnnnnnnnnnnnnnnnnnnnnnnnnnnnnnnnnnnnnnnnnnnnnnnnnnnnnnnnnnnnnnnnnnnnnnnnnnnnnnnnnnnnnnnnnnnnnnnnnnnnnnnnnnnnnnnnnnnnnnnnnnnnnnnnnnnnnnnnnnnnnnnnnnnnnnnnnnnnnnnnnnnnnnnnnnnnnnnnnnnnnnnnnnnnnnnnnnnnnnnnnnnnnnnnnnnnnnnnnnnnnnnnnnnnnnnnnnnnnnnnnnnnnnnnnnnnnnnnnnnnnnnnnnnnnnnnnnnnnnnnnnnnnnnnnnnnnnnnnnnnnnnnnnnnnnnnnnnnnnnnnnnnnnnnnnnnnnnnnnnnnnnnnnnnnnnnnnnnnnnnnnnnnnnnnnnnnnnnnnnnnnnnnnnnnnnnnnnnnnnnnnnnnnnnnnnnnnnnnnnnnnnnnnnnnnnnnnnnnnnnnnnnnnnnnnnnnnnnnnnnnnnnnnnnnnnnnnnnnnnnnnnnnnnnnnnnnnnnnnnnnnnnnnnnnnnnnnnnnnnnnnnnnnnnnnnnnnnnnnnnnnnnnnnnnnnnnnnnnnnnnnnnnnnnnnnnnnnnnnnnnnnnnnnnnnnnnnnnnnnnnnnnnnnnnnnnnnnnnnnnnnnnnnnnnnnnnnnnnnnnnnnnnnnnnnnnnnnnnnnnnnnnnnnnnnnnnnnnnnnnnnnnnnnnnnnnnnnnnnnnnnnnnnnnnnnnnnnnnnnnnnnnnnnnnnnnnnnnnnnnnnnnnnnnnnnnnnnnnnnnnnnnnnnnnnnnnnnnnnnnnnnnnnnnnnnnnnnnnnnnnnnnnnnnnnnnnnnnnnnnnnnnnnnnnnnnnnnnnnnnnnnnnnnnnnnnnnnnnnnnnnnnnnnnnnnnnnnnnnnnnnnnnnnnnnnnnnnnnnnnnnnnnnnnnnnnnnnnnnnnnnnnnnnnnnnnnnnnnnnnnnnnnnnnnnnnnnnnnnnnnnnnnnnnnnnnnnnnnnnnnnnnnnnnnnnnnnnnnnnnnnnnnnnnnnnnnnnnnnnnnnnnnnnnnnnnnnnnnnnnnnnnnnnnnnnnnnnnnnnnnnnnnnnnnnnnnnnnnnnnnnnnnnnnnnnnnnnnnnnnnnnnnnnnnnnnnnnnnnnnnnnnnnnnnnnnnnnnnnnnnnnnnnnnnnnnnnnnnnnnnnnnnnnnnnnnnnnnnnnnnnnnnnnnnnnnnnnnnnnnnnnnnnnnnnnnnnnnnnnnnnnnnnnnnnnnnnnnnnnnnnnnnnnnnnnnnnnnnnnnnnnnnnnnnnnnnnnnnnnnnnnnnnnnnnnnnnnnnnnnnnnnnnnnnnnnnnnnnnnnnnnnnnnnnnnnnnnnnnnnnnnnnnnnnnnnnnnnnnnnnnnnnnnnnnnnnnnnnnnnnnnnnnnnnnnnnnnnnnnnnnnnnnnnnnnnnnnnnnnnnnnnnnnnnnnnnnnnnnnnnnnnnnnnnnnnnnnnnnnnnnnnnnnnnnnnnnnnnnnnnnnnnnnnnnnnnnnnnnnnnnnnnnnnnnnnnnnnnnnnnnnnnnnnnnnnnnnnnnnnnnnnnnnnnnnnnnnnnnnnnnnnnnnnnnnnnnnnnnnnnnnnnnnnnnnnnnnnnnnnnnnnnnnnnnnnnnnnnnnnnnnnnnnnnnnnnnnnnnnnnnnnnnnnnnnnnnnnnnnnnnnnnnnnnnnnnnnnnnnnnnnnnnnnnnnnnnnnnnnnnnnnnnnnnnnnnnnnnnnnnnnnnnnnnnnnnnnnnnnnnnnnnnnnnnnnnnnnnnnnnnnnnnnnnnnnnnnnnnnnnnnnnnnnnnnnnnnnnnnnnnnnnnnnnnnnnnnnnnnnnnnnnnnnnnnnnnnnnnnnnnnnnnnnnnnnnnnnnnnnnnnnnnnnnnnnnnnnnnnnnnnnnnnnnnnnnnnnnnnnnnnnnnnnnnnnnnnnnnnnnnnnnnnnnnnnnnnnnnnnnnnnnnnnnnnnnnnnnnnnnnnnnnnnnnnnnnnnnnnnnnnnnnnnnnnnnnnnnnnnnnnnnnnnnnnnnnnnnnnnnnnnnnnnnnnnnnnnnnnnnnnnnnnnnnnnnnnnnnnnnnnnnnnnnnnnnnnnnnnnnnnnnnnnnnnnnnnnnnnnnnnnnnnnnnnnnnnnnnnnnnnnnnnnnnnnnnnnnnnnnnnnnnnnnnnnnnnnnnnnnnnnnnnnnnnnnnnnnnnnnnnnnnnnnnnnnnnnnnnnnnnnnnnnnnnnnnnnnnnnnnnnnnnnnnnnnnnnnnnnnnnnnnnnnnnnnnnnnnnnnnnnnnnnnnnnnnnnnnnnnnnnnnnnnnnnnnnnnnnnnnnnnnnnnnnnnnnnnnnnnnnnnnnnnnnnnnnnnnnnnnnnnnnnnnnnnnnnnnnnnnnnnnnnnnnnnnnnnnnnnnnnnnnnnnnnnnnnnnnnnnnnnnnnnnnnnnnnnnnnnnnnnnnnnnnnnnnnnnnnnnnnnnnnnnnnnnnnnnnnnnnnnnnnnnnnnnnnnnnnnnnnnnnnnnnnnnnnnnnnnnnnnnnnnnnnnnnnnnnnnnnnnnnnnnnnnnnnnnnnnnnnnnnnnnnnnnnnnnnnnnnnnnnnnnnnnnnnnnnnnnnnnnnnnnnnnnnnnnnnnnnnnnnnnnnnnnnnnnnnnnnnnnnnnnnnnnnnnnnnnnnnnnnnnnnnnnnnnnnnnnnnnnnnnnnnnnnnnnnnnnnnnnnnnnnnnnnnnnnnnnnnnnnnnnnnnnnnnnnnnnnnnnnnnnnnnnnnnnnnnnnnnnnnnnnnnnnnnnnnnnnnnnnnnnnnnnnnnnnnnnnnnnnnnnnnnnnnnnnnnnnnnnnnnnnnnnnnnnnnnnnnnnnnnnnnnnnnnnnnnnnnnnnnnnnnnnnnnnnnnnnnnnnnnnnnnnnnnnnnnnnnnnnnnnnnnnnnnnnnnnnnnnnnnnnnnnnnnnnnnnnnnnnnnnnnnnnnnnnnnnnnnnnnnnnnnnnnnnnnnnnnnnnnnnnnnnnnnnnnnnnnnnnnnnnnnnnnnnnnnnnnnnnnnnnnnnnnnnnnnnnnnnnnnnnnnnnnnnnnnnnnnnnnnnnnnnnnnnnnnnnnnnnnnnnnnnnnnnnnnnnnnnnnnnnnnnnnnnnnnnnnnnnnnnnnnnnnnnnnnnnnnnnnnnnnnnnnnnnnnnnnnnnnnnnnnnnnnnnnnnnnnnnnnnnnnnnnnnnnnnnnnnnnnnnnnnnnnnnnnnnnnnnnnnnnnnnnnnnnnnnnnnnnnnnnnnnnnnnnnnnnnnnnnnnnnnnnnnnnnnnnnnnnnnnnnnnnnnnnnnnnnnnnnnnnnnnnnnnnnnnnnnnnnnnnnnnnnnnnnnnnnnnnnnnnnnnnnnnnnnnnnnnnnnnnnnnnnnnnnnnnnnnnnnnnnnnnnnnnnnnnnnnnnnnnnnnnnnnnnnnnnnnnnnnnnnnnnnnnnnnnnnnnnnnnnnnnnnnnnnnnnnnnnnnnnnnnnnnnnnnnnnnnnnnnnnnnnnnnnnnnnnnnnnnnnnnnnnnnnnnnnnnnnnnnnnnnnnnnnnnnnnnnnnnnnnnnnnnnnnnnnnnnnnnnnnnnnnnnnnnnnnnnnnnnnnnnnnnnnnnnnnnnnnnnnnnnnnnnnnnnnnnnnnnnnnnnnnnnnnnnnnnnnnnnnnnnnnnnnnnnnnnnnnnnnnnnnnnnnnnnnnnnnnnnnnnnnnnnnnnnnnnnnnnnnnnnnnnnnnnnnnnnnnnnnnnnnnnnnnnnnnnnnnnnnnnnnnnnnnnnnnnnnnnnnnnnnnnnnnnnnnnnnnnnnnnnnnnnnnnnnnnnnnnnnnnnnnnnnnnnnnnnnnnnnnnnnnnnnnnnnnnnnnnnnnnnnnnnnnnnnnnnnnnnnnnnnnnnnnnnnnnnnnnnnnnnnnnnnnnnnnnnnnnnnnnnnnnnnnnnnnnnnnnnnnnnnnnnnnnnnnnnnnnnnnnnnnnnnnnnnnnnnnnnnnnnnnnnnnnnnnnnnnnnnnnnnnnnnnnnnnnnnnnnnnnnnnnnnnnnnnnnnnnnnnnnnnnnnnnnnnnnnnnnnnnnnnnnnnnnnnnnnnnnnnnnnnnnnnnnnnnnnnnnnnnnnnnnnnnnnnnnnnnnnnnnnnnnnnnnnnnnnnnnnnnnnnnnnnnnnnnnnnnnnnnnnnnnnnnnnnnnnnnnnnnnnnnnnnnnnnnnnnnnnnnnnnnnnnnnnnnnnnnnnnnnnnnnnnnnnnnnnnnnnnnnnnnnnnnnnnnnnnnnnnnnnnnnnnnnnnnnnnnnnnnnnnnnnnnnnnnnnnnnnnnnnnnnnnnnnnnnnnnnnnnnnnnnnnnnnnnnnnnnnnnnnnnnnnnnnnnnnnnnnnnnnnnnnnnnnnnnnnnnnnnnnnnnnnnnnnnnnnnnnnnnnnnnnnnnnnnnnnnnnnnnnnnnnnnnnnnnnnnnnnnnnnnnnnnnnnnnnnnnnnnnnnnnnnnnnnnnnnnnnnnnnnnnnnnnnnnnnnnnnnnnnnnnnnnnnnnnnnnnnnnnnnnnnnnnnnnnnnnnnnnnnnnnnnnnnnnnnnnnnnnnnnnnnnnnnnnnnnnnnnnnnnnnnnnnnnnnnnnnnnnnnnnnnnnnnnnnnnnnnnnnnnnnnnnnnnnnnnnnnnnnnnnnnnnnnnnnnnnnnnnnnnnnnnnnnnnnnnnnnnnnnnnnnnnnnnnnnnnnnnnnnnnnnnnnnnnnnnnnnnnnnnnnnnnnnnnnnnnnnnnnnnnnnnnnnnnnnnnnnnnnnnnnnnnnnnnnnnnnnnnnnnnnnnnnnnnnnnnnnnnnnnnnnnnnnnnnnnnnnnnnnnnnnnnnnnnnnnnnnnnnnnnnnnnnnnnnnnnnnnnnnnnnnnnnnnnnnnnnnnnnnnnnnnnnnnnnnnnnnnnnnnnnnnnnnnnnnnnnnnnnnnnnnnnnnnnnnnnnnnnnnnnnnnnnnnnnnnnnnnnnnnnnnnnnnnnnnnnnnnnnnnnnnnnnnnnnnnnnnnnnnnnnnnnnnnnnnnnnnnnnnnnnnnnnnnnnnnnnnnnnnnnnnnnnnnnnnnnnnnnnnnnnnnnnnnnnnnnnnnnnnnnnnnnnnnnnnnnnnnnnnnnnnnnnnnnnnnnnnnnnnnnnnnnnnnnnnnnnnnnnnnnnnnnnnnnnnnnnnnnnnnnnnnnnnnnnnnnnnnnnnnnnnnnnnnnnnnnnnnnnnnnnnnnnnnnnnnnnnnnnnnnnnnnnnnnnnnnnnnnnnnnnnnnnnnnnnnnnnnnnnnnnnnnnnnnnnnnnnnnnnnnnnnnnnnnnnnnnnnnnnnnnnnnnnnnnnnnnnnnnnnnnnnnnnnnnnnnnnnnnnnnnnnnnnnnnnnnnnnnnnnnnnnnnnnnnnnnnnnnnnnnnnnnnnnnnnnnnnnnnnnnnnnnnnnnnnnnnnnnnnnnnnnnnnnnnnnnnnnnnnnnnnnnnnnnnnnnnnnnnnnnnnnnnnnnnnnnnnnnnnnnnnnnnnnnnnnnnnnnnnnnnnnnnnnnnnnnnnnnnnnnnnnnnnnnnnnnnnnnnnnnnnnnnnnnnnnnnnnnnnnnnnnnnnnnnnnnnnnnnnnnnnnnnnnnnnnnnnnnnnnnnnnnnnnnnnnnnnnnnnnnnnnnnnnnnnnnnnnnnnnnnnnnnnnnnnnnnnnnnnnnnnnnnnnnnnnnnnnnnnnnnnnnnnnnnnnnnnnnnnnnnnnnnnnnnnnnnnnnnnnnnnnnnnnnnnnnnnnnnnnnnnnnnnnnnnnnnnnnnnnnnnnnnnnnnnnnnnnnnnnnnnnnnnnnnnnnnnnnnnnnnnnnnnnnnnnnnnnnnnnnnnnnnnnnnnnnnnnnnnnnnnnnnnnnnnnnnnnnnnnnnnnnnnnnnnnnnnnnnnnnnnnnnnnnnnnnnnnnnnnnnnnnnnnnnnnnnnnnnnnnnnnnnnnnnnnnnnnnnnnnnnnnnnnnnnnnnnnnnnnnnnnnnnnnnnnnnnnnnnnnnnnnnnnnnnnnnnnnnnnnnnnnnnnnnnnnnnnnnnnnnnnnnnnnnnnnnnnnnnnnnnnnnnnnnnnnnnnnnnnnnnnnnnnnnnnnnnnnnnnnnnnnnnnnnnnnnnnnnnnnnnnnnnnnnnnnnnnnnnnnnnnnnnnnnnnnnnnnnnnnnnnnnnnnnnnnnnnnnnnnnnnnnnnnnnnnnnnnnnnnnnnnnnnnnnnnnnnnnnnnnnnnnnnnnnnnnnnnnnnnnnnnnnnnnnnnnnnnnnnnnnnnnnnnnnnnnnnnnnnnnnnnnnnnnnnnnnnnnnnnnnnnnnnnnnnnnnnnnnnnnnnnnnnnnnnnnnnnnnnnnnnnnnnnnnnnnnnnnnnnnnnnnnnnnnnnnnnnnnnnnnnnnnnnnnnnnnnnnnnnnnnnnnnnnnnnnnnnnnnnnnnnnnnnnnnnnnnnnnnnnnnnnnnnnnnnnnnnnnnnnnnnnnnnnnnnnnnnnnnnnnnnnnnnnnnnnnnnnnnnnnnnnnnnnnnnnnnnnnnnnnnnnnnnnnnnnnnnnnnnnnnnnnnnnnnnnnnnnnnnnnnnnnnnnnnnnnnnnnnnnnnnnnnnnnnnnnnnnnnnnnnnnnnnnnnnnnnnnnnnnnnnnnnnnnnnnnnnnnnnnnnnnnnnnnnnnnnnnnnnnnnnnnnnnnnnnnnnnnnnnnnnnnnnnnnnnnnnnnnnnnnnnnnnnnnnnnnnnnnnnnnnnnnnnnnnnnnnnnnnnnnnnnnnnnnnnnnnnnnnnnnnnnnnnnnnnnnnnnnnnnnnnnnnnnnnnnnnnnnnnnnnnnnnnnnnnnnnnnnnnnnnnnnnnnnnnnnnnnnnnnnnnnnnnnnnnnnnnnnnnnnnnnnnnnnnnnnnnnnnnnnnnnnnnnnnnnnnnnnnnnnnnnnnnnnnnnnnnnnnnnnnnnnnnnnnnnnnnnnnnnnnnnnnnnnnnnnnnnnnnnnnnnnnnnnnnnnnnnnnnnnnnnnnnnnnnnnnnnnnnnnnnnnnnnnnnnnnnnnnnnnnnnnnnnnnnnnnnnnnnnnnnnnnnnnnnnnnnnnnnnnnnnnnnnnnnnnnnnnnnnnnnnnnnnnnnnnnnnnnnnnnnnnnnnnnnnnnnnnnnnnnnnnnnnnnnnnnnnnnnnnnnnnnnnnnnnnnnnnnnnnnnnnnnnnnnnnnnnnnnnnnnnnnnnnnnnnnnnnnnnnnnnnnnnnnnnnnnnnnnnnnnnnnnnnnnnnnnnnnnnnnnnnnnnnnnnnnnnnnnnnnnnnnnnnnnnnnnnnnnnnnnnnnnnnnnnnnnnnnnnnnnnnnnnnnnnnnnnnnnnnnnnnnnnnnnnnnnnnnnnnnnnnnnnnnnnnnnnnnnnnnnnnnnnnnnnnnnnnnnnnnnnnnnnnnnnnnnnnnnnnnnnnnnnnnnnnnnnnnnnnnnnnnnnnnnnnnnnnnnnnnnnnnnnnnnnnnnnnnnnnnnnnnnnnnnnnnnnnnnnnnnnnnnnnnnnnnnnnnnnnnnnnnnnnnnnnnnnnnnnnnnnnnnnnnnnnnnnnnnnnnnnnnnnnnnnnnnnnnnnnnnnnnnnnnnnnnnnnnnnnnnnnnnnnnnnnnnnnnnnnnnnnnnnnnnnnnnnnnnnnnnnnnnnnnnnnnnnnnnnnnnnnnnnnnnnnnnnnnnnnnnnnnnnnnnnnnnnnnnnnnnnnnnnnnnnnnnnnnnnnnnnnnnnnnnnnnnnnnnnnnnnnnnnnnnnnnnnnnnnnnnnnnnnnnnnnnnnnnnnnnnnnnnnnnnnnnnnnnnnnnnnnnnnnnnnnnnnnnnnnnnnnnnnnnnnnnnnnnnnnnnnnnnnnnnnnnnnnnnnnnnnnnnnnnnnnnnnnnnnnnnnnnnnnnnnnnnnnnnnnnnnnnnnnnnnnnnnnnnnnnnnnnnnnnnnnnnnnnnnnnnnnnnnnnnnnnnnnnnnnnnnnnnnnnnnnnnnnnnnnnnnnnnnnnnnnnnnnnnnnnnnnnnnnnnnnnnnnnnnnnnnnnnnnnnnnnnnnnnnnnnnnnnnnnnnnnnnnnnnnnnnnnnnnnnnnnnnnnnnnnnnnnnnnnnnnnnnnnnnnnnnnnnnnnnnnnnnnnnnnnnnnnnnnnnnnnnnnnnnnnnnnnnnnnnnnnnnnnnnnnnnnnnnnnnnnnnnnnnnnnnnnnnnnnnnnnnnnnnnnnnnnnnnnnnnnnnnnnnnnnnnnnnnnnnnnnnnnnnnnnnnnnnnnnnnnnnnnnnnnnnnnnnnnnnnnnnnnnnnnnnnnnnnnnnnnnnnnnnnnnnnnnnnnnnnnnnnnnnnnnnnnnnnnnnnnnnnnnnnnnnnnnnnnnnnnnnnnnnnnnnnnnnnnnnnnnnnnnnnnnnnnnnnnnnnnnnnnnnnnnnnnnnnnnnnnnnnnnnnnnnnnnnnnnnnnnnnnnnnnnnnnnnnnnnnnnnnnnnnnnnnnnnnnnnnnnnnnnnnnnnnnnnnnnnnnnnnnnnnnnnnnnnnnnnnnnnnnnnnnnnnnnnnnnnnnnnnnnnnnnnnnnnnnnnnnnnnnnnnnnnnnnnnnnnnnnnnnnnnnnnnnnnnnnnnnnnnnnnnnnnnnnnnnnnnnnnnnnnnnnnnnnnnnnnnnnnnnnnnnnnnnnnnnnnnnnnnnnnnnnnnnnnnnnnnnnnnnnnnnnnnnnnnnnnnnnnnnnnnnnnnnnnnnnnnnnnnnnnnnnnnnnnnnnnnnnnnnnnnnnnnnnnnnnnnnnnnnnnnnnnnnnnnnnnnnnnnnnnnnnnnnnnnnnnnnnnnnnnnnnnnnnnnnnnnnnnnnnnnnnnnnnnnnnnnnnnnnnnnnnnnnnnnnnnnnnnnnnnnnnnnnnnnnnnnnnnnnnnnnnnnnnnnnnnnnnnnnnnnnnnnnnnnnnnnnnnnnnnnnnnnnnnnnnnnnnnnnnnnnnnnnnnnnnnnnnnnnnnnnnnnnnnnnnnnnnnnnnnnnnnnnnnnnnnnnnnnnnnnnnnnnnnnnnnnnnnnnnnnnnnnnnnnnnnnnnnnnnnnnnnnnnnnnnnnnnnnnnnnnnnnnnnnnnnnnnnnnnnnnnnnnnnnnnnnnnnnnnnnnnnnnnnnnnnnnnnnnnnnnnnnnnnnnnnnnnnnnnnnnnnnnnnnnnnnnnnnnnnnnnnnnnnnnnnnnnnnnnnnnnnnnnnnnnnnnnnnnnnnnnnnnnnnnnnnnnnnnnnnnnnnnnnnnnnnnnnnnnnnnnnnnnnnnnnnnnnnnnnnnnnnnnnnnnnnnnnnnnnnnnnnnnnnnnnnnnnnnnnnnnnnnnnnnnnnnnnnnnnnnnnnnnnnnnnnnnnnnnnnnnnnnnnnnnnnnnnnnnnnnnnnnnnnnnnnnnnnnnnnnnnnnnnnnnnnnnnnnnnnnnnnnnnnnnnnnnnnnnnnnnnnnnnnnnnnnnnnnnnnnnnnnnnnnnnnnnnnnnnnnnnnnnnnnnnnnnnnnnnnnnnnnnnnnnnnnnnnnnnnnnnnnnnnnnnnnnnnnnnnnnnnnnnnnnnnnnnnnnnnnnnnnnnnnnnnnnnnnnnnnnnnnnnnnnnnnnnnnnnnnnnnnnnnnnnnnnnnnnnnnnnnnnnnnnnnnnnnnnnnnnnnnnnnnnnnnnnnnnnnnnnnnnnnnnnnnnnnnnnnnnnnnnnnnnnnnnnnnnnnnnnnnnnnnnnnnnnnnnnnnnnnnnnnnnnnnnnnnnnnnnnnnnnnnnnnnnnnnnnnnnnnnnnnnnnnnnnnnnnnnnnnnnnnnnnnnnnnnnnnnnnnnnnnnnnnnnnnnnnnnnnnnnnnnnnnnnnnnnnnnnnnnnnnnnnnnnnnnnnnnnnnnnnnnnnnnnnnnnnnnnnnnnnnnnnnnnnnnnnnnnnnnnnnnnnnnnnnnnnnnnnnnnnnnnnnnnnnnnnnnnnnnnnnnnnnnnnnnnnnnnnnnnnnnnnnnnnnnnnnnnnnnnnnnnnnnnnnnnnnnnnnnnnnnnnnnnnnnnnnnnnnnnnnnnnnnnnnnnnnnnnnnnnnnnnnnnnnnnnnnnnnnnnnnnnnnnnnnnnnnnnnnnnnnnnnnnnnnnnnnnnnnnnnnnnnnnnnnnnnnnnnnnnnnnnnnnnnnnnnnnnnnnnnnnnnnnnnnnnnnnnnnnnnnnnnnnnnnnnnnnnnnnnnnnnnnnnnnnnnnnnnnnnnnnnnnnnnnnnnnnnnnnnnnnnnnnnnnnnnnnnnnnnnnnnnnnnnnnnnnnnnnnnnnnnnnnnnnnnnnnnnnnnnnnnnnnnnnnnnnnnnnnnnnnnnnnnnnnnnnnnnnnnnnnnnnnnnnnnnnnnnnnnnnnnnnnnnnnnnnnnnnnnnnnnnnnnnnnnnnnnnnnnnnnnnnnnnnnnnnnnnnnnnnnnnnnnnnnnnnnnnnnnnnnnnnnnnnnnnnnnnnnnnnnnnnnnnnnnnnnnnnnnnnnnnnnnnnnnnnnnnnnnnnnnnnnnnnnnnnnnnnnnnnnnnnnnnnnnnnnnnnnnnnnnnnnnnnnnnnnnnnnnnnnnnnnnnnnnnnnnnnnnnnnnnnnnnnnnnnnnnnnnnnnnnnnnnnnnnnnnnnnnnnnnnnnnnnnnnnnnnnnnnnnnnnnnnnnnnnnnnnnnnnnnnnnnnnnnnnnnnnnnnnnnnnnnnnnnnnnnnnnnnnnnnnnnnnnnnnnnnnnnnnnnnnnnnnnnnnnnnnnnnnnnnnnnnnnnnnnnnnnnnnnnnnnnnnnnnnnnnnnnnnnnnnnnnnnnnnnnnnnnnnnnnnnnnnnnnnnnnnnnnnnnnnnnnnnnnnnnnnnnnnnnnnnnnnnnnnnnnnnnnnnnnnnnnnnnnnnnnnnnnnnnnnnnnnnnnnnnnnnnnnnnnnnnnnnnnnnnnnnnnnnnnnnnnnnnnnnnnnnnnnnnnnnnnnnnnnnnnnnnnnnnnnnnnnnnnnnnnnnnnnnnnnnnnnnnnnnnnnnnnnnnnnnnnnnnnnnnnnnnnnnnnnnnnnnnnnnnnnnnnnnnnnnnnnnnnnnnnnnnnnnnnnnnnnnnnnnnnnnnnnnnnnnnnnnnnnnnnnnnnnnnnnnnnnnnnnnnnnnnnnnnnnnnnnnnnnnnnnnnnnnnnnnnnnnnnnnnnnnnnnnnnnnnnnnnnnnnnnnnnnnnnnnnnnnnnnnnnnnnnnnnnnnnnnnnnnnnnnnnnnnnnnnnnnnnnnnnnnnnnnnnnnnnnnnnnnnnnnnnnnnnnnnnnnnnnnnnnnnnnnnnnnnnnnnnnnnnnnnnnnnnnnnnnnnnnnnnnnnnnnnnnnnnnnnnnnnnnnnnnnnnnnnnnnnnnnnnnnnnnnnnnnnnnnnnnnnnnnnnnnnnnnnnnnnnnnnnnnnnnnnnnnnnnnnnnnnnnnnnnnnnnnnnnnnnnnnnnnnnnnnnnnnnnnnnnnnnnnnnnnnnnnnnnnnnnnnnnnnnnnnnnnnnnnnnnnnnnnnnnnnnnnnnnnnnnnnnnnnnnnnnnnnnnnnnnnnnnnnnnnncccgccggaagtgcggtcagaggctaatatatcatagctgtatagctaagacaagaaaatttcttaatttttcgattttcttgattttttcacagcttctttttgtcgggatgtatgcgccacagggacgatatattgttggggtgggttctacgacatgaacatctggagccccaagaagcgagacgagaaattgaatcacaggcgcgacaatcccgtcaaacgagtgctggtcaagcacccgggcgactggccgtggtcgcgctgcggcgggaggttctatttctggaatgatggttcgatcttgagcatggacaagaggctatgaaggtgtcgacatgccgaggggcgcatacatcccgacaaaaacccgtcgggacgtatgcgccacccgcgaaatcgatcgcaagattccctccgaatcggaacgccgcggaggcatcaaagcttctgcgcttagtcaacggcgcgccttgcagcctgtgaagtgtgggctaagcggacgcgataaccgttgtcgtggtcttcgggccttgcctttgccgcgtcccgggtgtataccttcgccatgattgtcctgtggtagctacgcagcggacggtccggtccccccggggcgcgacgggcctgccacccgcctcttgcccaggcaaggaggaagccgtggagtacaacctgctcgaagaaaagtggattcccgttctgtggaaagatgggcacagcggtcgcgtgggcattagtgaggcccttaggcaagcaggccggattcgccaaatcgcggccagcaacccaatggaccgcctggccatcctgcgtttcctgcttgcgttgctctattggtgcaaagggaatcccccggacgacaagaactcgatttcttcgtttccctctgattggttcaagaaactcgatgacaacaaagactgtttcaaccttcagggcgatgggaagcggttttaccaacgcaagcctaaccgacttgagaagaagctgtccgtcaactatctgatgcaagaagtgccgaccggcacaaacttctggcacttccggcatgggacagatttcagaaacggcttatgtccggcatgctgcgcaatgggcttgttgcgccttccgctctttgctacgtcggccgggcgcggcaagcccccgggcgtcaatcaaaaaccgccgatctacatcgtgccgatgggcgactgcctttccgaaaccctgcgcctctcatggcggaagacgtcggagatgaacctgggcacgcccacatgggaaaatccggacataagcctccctcaacacggcaatgttccattattgataggattaacgtgggtaccgcggcgcgtctggttagacactccggagacaccagagtccaactgcatcgcctgcgggcgcagggaggctctgatacgtcaatgtgtctttgcgggtattgggagcacaaagacaggcgaaggcagtctggcacgaatctggaacgacccgcacaccatcagcgaaggcgacgagattgtgaagcctttcagcgcgcttggcccggccgacgctgcggctgggaagtggacgaaggtcgtggcgggaatcctgtgcggggaaaagccgaaggggaacagtaagttgtgggtcgtcagctttgcgacagtgcagaacgacaaatacctggaagcagccgagcgggagattcaattcttggccgcgctcgacgacgtgaaggttcaggcgagtttgcaagaaatccaggcgtggcagaaggaaggctggaagctcgttggcagagccaaaccgcgagagacttcacgaaacagaggacaccttgaaattctctccgcagtcgccgctgttcgtccccaagccgaggcaacggtttccggaaaaatcgacgagatgatcgcagaaggcggtaaggcatgggaagaggcggcccaggaatatcgtccgttgatggccgccgtcgccaaatcgctttccccgggctacacaaccgcttccctccggaggcgacaagaaattgccgctgtaaagccggacatgcggccaaagagaaacaacaaagacgaagggggggacaagtgactccaacggagcagtacgtcgaagttctgactcgactgaaacccggtgagctcgggctcttgcgcaaccatgccgggcaagggctcgacgaatcggtagagggctttgaccttttcgcaggcctttggtggccgctgcgggcgcaaacccaacgggcgcctcgccgtgaggtggcctggcttgtcgccaaactctacgccctccggcccctcgagcattcaccccgcgagaccctcgctcgccagctcgggcgatcccggccgggcgagaaaacagcgcggcagcgtttcgagcaacgcttcgacaggatgctcacgctgccgcttgctgaaatcgaacccgccctacagtgggcaatcgacctcatagcttccaagcacctcgaactcgactgggtgcggctgacgaacgatctttccatctgggaacgcgaatccacccggctcaaatgggccgaggaatttttgaactgtccaagaggaggagagtcatgttgatccagattcacgccattcagaatcacagcccggccaacctgaaccgggatgacctgggcgcgcccaagacttgcttttttggcggagtcttgcgctcccgtatttccagccagtgccttaagcgcagcatccgcatgagtgaggagttcagacaattgctgggcggagttcgcacccgccagttggcgaaagagattgcggaaaaggtgacgggcaaagacgtcaggaagcgagcggagaacattctcaaagcctgcgggctggagcctaagaaagcaaaaaaacaggaaggagaagacgaacaggaaagtgctgagaggagcaagatgctggtttacaccacccaagaggcgattacacgcatggccgaactcctccagcagggcgacggaaaaacggacgaggccttggcagcggagttcggcaagctcatcagtgaatccgtcgccgtgccggacatggcgctgagcggcaggatgcttgaaacgggagtcctcaaagacacgacggttgaggcatcgcttcaagtcgcccatgccatttccacccatgaggcccggcccgaggtggactactatgtcgccgccgatgatgtccccggcgaggacgcgggcgcaggttacgtggatgaagccatgttcggttcggcatgtttctacaagtatttctccattcattgggaaacgctggtcaaaaacctgaagcccttcgggacgaatcacgaaaaactggcggcccataccgtcggcgccttcattcgcgccgcggccttggccaaccccacgggaaaacaaaatagttttgccgcgcacaaccctcctgacgggatgttggtggaagtcagaaacactcccatcagctacgccaacgccttcgccaaaccggcggctcctcagggcgaacgggacatcatctcgcagagcgtggcgcagcttgcccattatgtgaacgacatagatacgggatacggcaagccgacgaagcggttctggttctctccaaatctccgctatccgttgacggctaccaccacggagagcgaagacggaaaacagaaacagcgtgaggtcccgcttgccgacaaagatgttaagtctcttgacgaactgatagcggctgtactcaaggaaatcggttacgactggcaggaggccaagaaagtggtcctgaatccggaggtgccccatgagcgcaaagacgctgctacttcggcttgaaggtcctcttcaggcatggggcgatcagcaatccaagttcgtcattcggcgcacggccgaggcgccgaccaagtccggcgtcatcgggatgctttgcgcggcattgggcgtttcccggccagaggcccgcgaaggctggcttccaaggctggcccggctgcgcatgggcgtacgcgtcgatgcgccaggggtccgctggtgggattatcacacggtgggtgcggggatgccgatgcgtaccgccgaggggggaaccaagtccggagccatgctcacccgccgcgaatacctttgcgacgcctcgtttctcgtcgctcttcagggcgaaccggacctcattgaggaactggaggcggcaatcaaagcgcccaagtggacactctacctcggcagaaagtgctgccccccttgccgccctctgctggagcatccgggaggtgaattccccgacttgctttctgccctcgaatcggtcccctggcgtcggcggctgaaggacgatccccagccgcgacccgtcgattgcctgcttgattgggaacccaccaacgagcagcccgaggcgcccgatgatgcgctcgtctggtacgacgtgccgttgacattcgagccgccgtcgcaccaaccccgattcgtcatccgcaggcagttgcgcgtcggagcggacggcgacgtaacacttgcggtgcagccaccgcagagcgacacgccaccgcctccgcgcccaagagcggattacacgaacacagagtacaaaaaccgacgcaaggagcggctcgacgacgactatcacttgtgcgttttttgcaagtctcccgccagcaccgtgcagcacatcacgtaccgccgcgcgggcggcggcgaactccgggacgatttgcgctccctctgccgcctctgccacgacgccgtgaccatgatcgagtacgggctcggaatgggcttggaccgcatcaaccccgaagagccccgttggcgcgacaagatcatcgagaagcgggaagagattatcaggttccgctctctggagactcgccgcagacgccttgccgctgaggaggtggaatagccatgtacctctcctgcctcttgattgacgtcggcaccaaccccgaccgccccaggcccgggcggctctggctgcgaaacctccatcacgtccaccagcgcctttgcatggcgtttccatccaaagaccgaatatcccacgatccccacttcctcaagcctttcaaacccgcggactttgccaacaaccaggtccatgtaagacgtgacggcgactccggctttctcttccgcatcgacccgcaaccgggcgggcgggtcgtgatcctcgtccagtctaactctgccgtaaagcctgactggggctacgccttccacaacgcccgttttcttctgaatcctctagccgctccccctcaggtgcaggaattcgacccccgctttgagaagggtcagcggcttcgcttccgtatccgcgccaatctgagtaagaagataaaaaccagcacagagggcgttgatcttacgaggacgcgagaggggacagataagcggggccgcccgaaggcccaaggcaaacgcgtggcgctgacctgggacaaggaccagaaccgcgacgatgtgatacgaaaatggttcgccggcaagggcggccaaggtggattccaagtggaaactttccgggtcttgcagatcgggtggggcgcaggagaccgatccgacccgaggccgacgggcggccgcatgaaatttcgctcggcgttattggaggggacgcttacggttgaggacgcggacagcttcagagaaaccatcgtgggcggcgttgggcacggcaaagccttcggcttcggcctgctttccgtggcgccgctctcgctgtagcggcggtctccgaccgccggtacgtcgatcggagatcgacgctacaatcccttgtcgatcggggatccgtgcaacatttcttgagcggagatcgagccaatatgaaattcaaaccccgcttgcggcgactggactggctctatacgggcagcccaatctactatctcacgctgtgtacgcaggaccgcaaacgctcgttggcaaatcctgcgattcaccgggaattcacgagattctccgaacgggcgagcgattttcttgtttgggtcgggttcttcatgatcatgcctgatcacatccatcttttcgccggcttttgtcgtgagtccccacctttagggaaatggatcaaggcgctgcgcggggatttatccaaagtcctccgggaagatgagggcgagggcacacattgggagaaagactttttcgatcacgtcctgagatcgcaagaatcctatcgggagaaatatgaatatgtccggcagaatccggtccgggccggtttagtcaagcgcccggaagattggccgtaccagggtgagatccatcgcctggttttgtagcggcggtctccgaccgccgtaacgtcgatcggagatcgactacaaccccggtcgatcggagatcgacgctacaaccgccgtcgatcggagatcgacgctacagcacgggctggaggctctgtgagaattcaagatctccacgttctacccaagttcagtgacgggtggagttatctgtacgtcgagcattgccacgtcgatcaggaagagcgggccattgccgtccacgatcaagccgggaaggtgccggtcccctgtgccaatctggctctcctgatgttgggtccgggcgtctcgattactcacgccgccatctccgtgttggcggaccatgggtgcctggtggcttggtgcggggaggagggagtccgcttctacgccgtgggcatgggcgagacgcgcaacgcggccaacttcctgcatcaggcgaggctgtgggcggaccagggtttccatatgcaggtggtgcgccgcctctatcagttgcgattttcggagaagttcgaccctgccctgaccctccagcaaatccgcggcatggagggcgtgcgggtgcgcgatgcctacgccaaggccgcccaggaagccggcatcacgtggtcgggccgcagctataaacgcgatgagtggagcaaggcggaccctgccaaccgagccttgtccgccgctaactcctgcctatatggaatctgccatgctgccatcgtgtcagcaggtttttcgcccgcactcgggtttatccacaccggcaagatgctgtccttcgtctacgatctcgccgacctgtacaaggctgaaattaccgttccagtggcatttcgcgccgccgccgaggggacgggacagttggaacgccgggtgcgcatcacctgccgcgatcagttcgtatccacgcggcttctggagagaatcatcccggatgtccaaagggcgttgatgctggcaaaagcgacggcctgggacactaccttcgacctggatgccgccgcccccggcttcctctgggacaatctggaaggagaggtcgaaggcggccgcctgctagcccccgaaatcggtgaaacggagcccggcgatggtggtcctgattcttgagcgcgtccccccagggttgcgaggcgagctgactcgctggtttttggaacctcaggcgggagtgttcgtgggacgcgtctccgccatggtccgtgatcggctctgggaaaaagcctgcagccaggccaagggaggcgggtgcttgattatctattcaagcgacaatgaacagggctttcgagtccgaacctggggccaaacagctcgggtcatcgatgacttcgagggcctttttctcgttcgcatgccgcagaatcaataatttagtaagtgttgtccccacgcgcgtgggggtgaaccgccggggctgaaggtttcatgggctggaaagaagttgtccccacgcgcgtgggggtgaaccgatatgctgcatgtgccggggctggcgcttgatgttgtccccacgcgcgtgggggtgaaccggtatcggcgagtggcaaggcgaatccacttaggttgtccccacgcgcgtgggggtgaaccgacctccgagggcgcggggcgcgtgctggcgatgttgtccccacgcgcgtgggggtgaaccggctggggccgacgcgcgcttgtgagactgcgggttgtccccacgcgcgtgggggtgaaccgcgggagaactttgaaggcacggtcctcgatcacgttgtccccacgcgcgtgggggtgaaccggcgcaggttaaggctgaggccaaggccgatgcgttgtccccacgcgcgtgggggtgaaccgtaatggtggcttgcaccttctgctcgaccgatgttgtccccacgcgcgtgggggtgaaccgcagcgggccgtgttggaggagaaggtcgcggagttgtccccacgcgcgtgggggtgaaccgttcccagccgcaggcaggatcaccgtaccccagttgtccccacgcgcgtgggggtgaaccgcaaaacaatatcaagaccaagcacttggatgtgttgtccccacgcgcgtgggggtgaaccgcatcgggcagcacagcggccttataccccaaagttgtccccacgcgcgtgggggtgaaccggcagctcgcggcgattcgcattgccgctgaaagttgtccccacgcgcgtgggggtgaaccggggagtcgtgagtgtagttacaggcagggttcgttgtccccacgcgcgtgggggtgaaccgcttctgcatcttataaagaacgccagtttgaagttgtccccacgcgcgtgggggtgaaccggtacggttcccaggggaattatttcttggggtgttgtccccacgcgcgtgggggtgaaccgatgtagcttgatatgggtgtggtgtcgcagaagttgtccccacgcgcgtgggggtgaaccggcggcgcgcacattccaacctcgtccgtatccgttgtccccacgcgcgtgggggtgaaccggcggacacggcggatgtgacgaatatggagtcgttgtccccacgcgcgtgggggtgaaccggtctctcgaaaaggaaagccaactttcagcttgttgtccccacgcgcgtgggggtgaaccgctcttggcatagagcttagtgagtttgatgaagttgtccccacgcgcgtgggggtgaaccgcctttgccctccgagacgcaacagctccattcgttgtccccacgcgcgtgggggtgaaccggcgagcgcaggtctaagcgaccgcgacaaagagttgtccccacgcgcgtgggggtgaaccggtgatggacacttcctaaaatggcattaagtcgttgtccccacgcgcgtgggggtgaaccgcagcgggtagcgcagacttcgtgcatatcgaagtctgcggcttttgccgccgtgaatcttgaaaagccgcagacctgcaaaaagcgcaggtctgcgctacccactgcctggccatcctggagaattgaaagtccctccagtaaagcggcgaagcgcaggatttccggctgcttcaatcgcttgcgacgctcaccggtcagtagcgcgttggtaatttcgagcccccatacggctggaacaacgagcgtctgcccttcagtgccaccaggaccccgtccgcgtattcgctcgcttcatccggggagcaccaggcaagcgccaccgacgcatgcaccacaacgccgctcaaaatcgccgtccctcaattatcatttcgcggacgctcatggtgtggggctttacgcgcttgcgcaacgcgcgcatgccctcgacaatctcctcgtgcgtcagctttcgatccgagtctcgaaccggcaccagcattgccgccggaacgccgtgtcttgtaatcgtgatcctttcgcaacccatcttgtccagctaaagctccgcatcagctatagtctccctctggccgtgcggcccgccccttgcggcgcaaccaaaccgaagctcaaaacgcgacatcgtcctcgtagcgcgaccggacactgaaggtaaaggttcgccacccgtctcccctgcaaaaccgggtcgcggagtactattgctttgcacagcgggggacgaccgaggcgctacggaagaggttggttcgcgaaactgagcaagagacccctcacccgtcccgctccggctggtggaagcgccggagcgggacacgctcagccccaagggagagggctatggattcagttctacgcgcggtgtccagtcaaagatgtgggacacgctcagccccaagggagagggctatgg

SEQ ID NO: 1059 - DNA, 106267 bp, Artificial Sequence
  Synthetic Oligonucleotide
  misc_feature (1)..(96247): n is a, c, g, or t
nnnnnnnnnnnnnnnnnnnnnnnnnnnnnnnnnnnnnnnnnnnnnnnnnnnnnnnnnnnnnnnnnnnnnnnnnnnnnnnnnnnnnnnnnnnnnnnnnnnnnnnnnnnnnnnnnnnnnnnnnnnnnnnnnnnnnnnnnnnnnnnnnnnnnnnnnnnnnnnnnnnnnnnnnnnnnnnnnnnnnnnnnnnnnnnnnnnnnnnnnnnnnnnnnnnnnnnnnnnnnnnnnnnnnnnnnnnnnnnnnnnnnnnnnnnnnnnnnnnnnnnnnnnnnnnnnnnnnnnnnnnnnnnnnnnnnnnnnnnnnnnnnnnnnnnnnnnnnnnnnnnnnnnnnnnnnnnnnnnnnnnnnnnnnnnnnnnnnnnnnnnnnnnnnnnnnnnnnnnnnnnnnnnnnnnnnnnnnnnnnnnnnnnnnnnnnnnnnnnnnnnnnnnnnnnnnnnnnnnnnnnnnnnnnnnnnnnnnnnnnnnnnnnnnnnnnnnnnnnnnnnnnnnnnnnnnnnnnnnnnnnnnnnnnnnnnnnnnnnnnnnnnnnnnnnnnnnnnnnnnnnnnnnnnnnnnnnnnnnnnnnnnnnnnnnnnnnnnnnnnnnnnnnnnnnnnnnnnnnnnnnnnnnnnnnnnnnnnnnnnnnnnnnnnnnnnnnnnnnnnnnnnnnnnnnnnnnnnnnnnnnnnnnnnnnnnnnnnnnnnnnnnnnnnnnnnnnnnnnnnnnnnnnnnnnnnnnnnnnnnnnnnnnnnnnnnnnnnnnnnnnnnnnnnnnnnnnnnnnnnnnnnnnnnnnnnnnnnnnnnnnnnnnnnnnnnnnnnnnnnnnnnnnnnnnnnnnnnnnnnnnnnnnnnnnnnnnnnnnnnnnnnnnnnnnnnnnnnnnnnnnnnnnnnnnnnnnnnnnnnnnnnnnnnnnnnnnnnnnnnnnnnnnnnnnnnnnnnnnnnnnnnnnnnnnnnnnnnnnnnnnnnnnnnnnnnnnnnnnnnnnnnnnnnnnnnnnnnnnnnnnnnnnnnnnnnnnnnnnnnnnnnnnnnnnnnnnnnnnnnnnnnnnnnnnnnnnnnnnnnnnnnnnnnnnnnnnnnnnnnnnnnnnnnnnnnnnnnnnnnnnnnnnnnnnnnnnnnnnnnnnnnnnnnnnnnnnnnnnnnnnnnnnnnnnnnnnnnnnnnnnnnnnnnnnnnnnnnnnnnnnnnnnnnnnnnnnnnnnnnnnnnnnnnnnnnnnnnnnnnnnnnnnnnnnnnnnnnnnnnnnnnnnnnnnnnnnnnnnnnnnnnnnnnnnnnnnnnnnnnnnnnnnnnnnnnnnnnnnnnnnnnnnnnnnnnnnnnnnnnnnnnnnnnnnnnnnnnnnnnnnnnnnnnnnnnnnnnnnnnnnnnnnnnnnnnnnnnnnnnnnnnnnnnnnnnnnnnnnnnnnnnnnnnnnnnnnnnnnnnnnnnnnnnnnnnnnnnnnnnnnnnnnnnnnnnnnnnnnnnnnnnnnnnnnnnnnnnnnnnnnnnnnnnnnnnnnnnnnnnnnnnnnnnnnnnnnnnnnnnnnnnnnnnnnnnnnnnnnnnnnnnnnnnnnnnnnnnnnnnnnnnnnnnnnnnnnnnnnnnnnnnnnnnnnnnnnnnnnnnnnnnnnnnnnnnnnnnnnnnnnnnnnnnnnnnnnnnnnnnnnnnnnnnnnnnnnnnnnnnnnnnnnnnnnnnnnnnnnnnnnnnnnnnnnnnnnnnnnnnnnnnnnnnnnnnnnnnnnnnnnnnnnnnnnnnnnnnnnnnnnnnnnnnnnnnnnnnnnnnnnnnnnnnnnnnnnnnnnnnnnnnnnnnnnnnnnnnnnnnnnnnnnnnnnnnnnnnnnnnnnnnnnnnnnnnnnnnnnnnnnnnnnnnnnnnnnnnnnnnnnnnnnnnnnnnnnnnnnnnnnnnnnnnnnnnnnnnnnnnnnnnnnnnnnnnnnnnnnnnnnnnnnnnnnnnnnnnnnnnnnnnnnnnnnnnnnnnnnnnnnnnnnnnnnnnnnnnnnnnnnnnnnnnnnnnnnnnnnnnnnnnnnnnnnnnnnnnnnnnnnnnnnnnnnnnnnnnnnnnnnnnnnnnnnnnnnnnnnnnnnnnnnnnnnnnnnnnnnnnnnnnnnnnnnnnnnnnnnnnnnnnnnnnnnnnnnnnnnnnnnnnnnnnnnnnnnnnnnnnnnnnnnnnnnnnnnnnnnnnnnnnnnnnnnnnnnnnnnnnnnnnnnnnnnnnnnnnnnnnnnnnnnnnnnnnnnnnnnnnnnnnnnnnnnnnnnnnnnnnnnnnnnnnnnnnnnnnnnnnnnnnnnnnnnnnnnnnnnnnnnnnnnnnnnnnnnnnnnnnnnnnnnnnnnnnnnnnnnnnnnnnnnnnnnnnnnnnnnnnnnnnnnnnnnnnnnnnnnnnnnnnnnnnnnnnnnnnnnnnnnnnnnnnnnnnnnnnnnnnnnnnnnnnnnnnnnnnnnnnnnnnnnnnnnnnnnnnnnnnnnnnnnnnnnnnnnnnnnnnnnnnnnnnnnnnnnnnnnnnnnnnnnnnnnnnnnnnnnnnnnnnnnnnnnnnnnnnnnnnnnnnnnnnnnnnnnnnnnnnnnnnnnnnnnnnnnnnnnnnnnnnnnnnnnnnnnnnnnnnnnnnnnnnnnnnnnnnnnnnnnnnnnnnnnnnnnnnnnnnnnnnnnnnnnnnnnnnnnnnnnnnnnnnnnnnnnnnnnnnnnnnnnnnnnnnnnnnnnnnnnnnnnnnnnnnnnnnnnnnnnnnnnnnnnnnnnnnnnnnnnnnnnnnnnnnnnnnnnnnnnnnnnnnnnnnnnnnnnnnnnnnnnnnnnnnnnnnnnnnnnnnnnnnnnnnnnnnnnnnnnnnnnnnnnnnnnnnnnnnnnnnnnnnnnnnnnnnnnnnnnnnnnnnnnnnnnnnnnnnnnnnnnnnnnnnnnnnnnnnnnnnnnnnnnnnnnnnnnnnnnnnnnnnnnnnnnnnnnnnnnnnnnnnnnnnnnnnnnnnnnnnnnnnnnnnnnnnnnnnnnnnnnnnnnnnnnnnnnnnnnnnnnnnnnnnnnnnnnnnnnnnnnnnnnnnnnnnnnnnnnnnnnnnnnnnnnnnnnnnnnnnnnnnnnnnnnnnnnnnnnnnnnnnnnnnnnnnnnnnnnnnnnnnnnnnnnnnnnnnnnnnnnnnnnnnnnnnnnnnnnnnnnnnnnnnnnnnnnnnnnnnnnnnnnnnnnnnnnnnnnnnnnnnnnnnnnnnnnnnnnnnnnnnnnnnnnnnnnnnnnnnnnnnnnnnnnnnnnnnnnnnnnnnnnnnnnnnnnnnnnnnnnnnnnnnnnnnnnnnnnnnnnnnnnnnnnnnnnnnnnnnnnnnnnnnnnnnnnnnnnnnnnnnnnnnnnnnnnnnnnnnnnnnnnnnnnnnnnnnnnnnnnnnnnnnnnnnnnnnnnnnnnnnnnnnnnnnnnnnnnnnnnnnnnnnnnnnnnnnnnnnnnnnnnnnnnnnnnnnnnnnnnnnnnnnnnnnnnnnnnnnnnnnnnnnnnnnnnnnnnnnnnnnnnnnnnnnnnnnnnnnnnnnnnnnnnnnnnnnnnnnnnnnnnnnnnnnnnnnnnnnnnnnnnnnnnnnnnnnnnnnnnnnnnnnnnnnnnnnnnnnnnnnnnnnnnnnnnnnnnnnnnnnnnnnnnnnnnnnnnnnnnnnnnnnnnnnnnnnnnnnnnnnnnnnnnnnnnnnnnnnnnnnnnnnnnnnnnnnnnnnnnnnnnnnnnnnnnnnnnnnnnnnnnnnnnnnnnnnnnnnnnnnnnnnnnnnnnnnnnnnnnnnnnnnnnnnnnnnnnnnnnnnnnnnnnnnnnnnnnnnnnnnnnnnnnnnnnnnnnnnnnnnnnnnnnnnnnnnnnnnnnnnnnnnnnnnnnnnnnnnnnnnnnnnnnnnnnnnnnnnnnnnnnnnnnnnnnnnnnnnnnnnnnnnnnnnnnnnnnnnnnnnnnnnnnnnnnnnnnnnnnnnnnnnnnnnnnnnnnnnnnnnnnnnnnnnnnnnnnnnnnnnnnnnnnnnnnnnnnnnnnnnnnnnnnnnnnnnnnnnnnnnnnnnnnnnnnnnnnnnnnnnnnnnnnnnnnnnnnnnnnnnnnnnnnnnnnnnnnnnnnnnnnnnnnnnnnnnnnnnnnnnnnnnnnnnnnnnnnnnnnnnnnnnnnnnnnnnnnnnnnnnnnnnnnnnnnnnnnnnnnnnnnnnnnnnnnnnnnnnnnnnnnnnnnnnnnnnnnnnnnnnnnnnnnnnnnnnnnnnnnnnnnnnnnnnnnnnnnnnnnnnnnnnnnnnnnnnnnnnnnnnnnnnnnnnnnnnnnnnnnnnnnnnnnnnnnnnnnnnnnnnnnnnnnnnnnnnnnnnnnnnnnnnnnnnnnnnnnnnnnnnnnnnnnnnnnnnnnnnnnnnnnnnnnnnnnnnnnnnnnnnnnnnnnnnnnnnnnnnnnnnnnnnnnnnnnnnnnnnnnnnnnnnnnnnnnnnnnnnnnnnnnnnnnnnnnnnnnnnnnnnnnnnnnnnnnnnnnnnnnnnnnnnnnnnnnnnnnnnnnnnnnnnnnnnnnnnnnnnnnnnnnnnnnnnnnnnnnnnnnnnnnnnnnnnnnnnnnnnnnnnnnnnnnnnnnnnnnnnnnnnnnnnnnnnnnnnnnnnnnnnnnnnnnnnnnnnnnnnnnnnnnnnnnnnnnnnnnnnnnnnnnnnnnnnnnnnnnnnnnnnnnnnnnnnnnnnnnnnnnnnnnnnnnnnnnnnnnnnnnnnnnnnnnnnnnnnnnnnnnnnnnnnnnnnnnnnnnnnnnnnnnnnnnnnnnnnnnnnnnnnnnnnnnnnnnnnnnnnnnnnnnnnnnnnnnnnnnnnnnnnnnnnnnnnnnnnnnnnnnnnnnnnnnnnnnnnnnnnnnnnnnnnnnnnnnnnnnnnnnnnnnnnnnnnnnnnnnnnnnnnnnnnnnnnnnnnnnnnnnnnnnnnnnnnnnnnnnnnnnnnnnnnnnnnnnnnnnnnnnnnnnnnnnnnnnnnnnnnnnnnnnnnnnnnnnnnnnnnnnnnnnnnnnnnnnnnnnnnnnnnnnnnnnnnnnnnnnnnnnnnnnnnnnnnnnnnnnnnnnnnnnnnnnnnnnnnnnnnnnnnnnnnnnnnnnnnnnnnnnnnnnnnnnnnnnnnnnnnnnnnnnnnnnnnnnnnnnnnnnnnnnnnnnnnnnnnnnnnnnnnnnnnnnnnnnnnnnnnnnnnnnnnnnnnnnnnnnnnnnnnnnnnnnnnnnnnnnnnnnnnnnnnnnnnnnnnnnnnnnnnnnnnnnnnnnnnnnnnnnnnnnnnnnnnnnnnnnnnnnnnnnnnnnnnnnnnnnnnnnnnnnnnnnnnnnnnnnnnnnnnnnnnnnnnnnnnnnnnnnnnnnnnnnnnnnnnnnnnnnnnnnnnnnnnnnnnnnnnnnnnnnnnnnnnnnnnnnnnnnnnnnnnnnnnnnnnnnnnnnnnnnnnnnnnnnnnnnnnnnnnnnnnnnnnnnnnnnnnnnnnnnnnnnnnnnnnnnnnnnnnnnnnnnnnnnnnnnnnnnnnnnnnnnnnnnnnnnnnnnnnnnnnnnnnnnnnnnnnnnnnnnnnnnnnnnnnnnnnnnnnnnnnnnnnnnnnnnnnnnnnnnnnnnnnnnnnnnnnnnnnnnnnnnnnnnnnnnnnnnnnnnnnnnnnnnnnnnnnnnnnnnnnnnnnnnnnnnnnnnnnnnnnnnnnnnnnnnnnnnnnnnnnnnnnnnnnnnnnnnnnnnnnnnnnnnnnnnnnnnnnnnnnnnnnnnnnnnnnnnnnnnnnnnnnnnnnnnnnnnnnnnnnnnnnnnnnnnnnnnnnnnnnnnnnnnnnnnnnnnnnnnnnnnnnnnnnnnnnnnnnnnnnnnnnnnnnnnnnnnnnnnnnnnnnnnnnnnnnnnnnnnnnnnnnnnnnnnnnnnnnnnnnnnnnnnnnnnnnnnnnnnnnnnnnnnnnnnnnnnnnnnnnnnnnnnnnnnnnnnnnnnnnnnnnnnnnnnnnnnnnnnnnnnnnnnnnnnnnnnnnnnnnnnnnnnnnnnnnnnnnnnnnnnnnnnnnnnnnnnnnnnnnnnnnnnnnnnnnnnnnnnnnnnnnnnnnnnnnnnnnnnnnnnnnnnnnnnnnnnnnnnnnnnnnnnnnnnnnnnnnnnnnnnnnnnnnnnnnnnnnnnnnnnnnnnnnnnnnnnnnnnnnnnnnnnnnnnnnnnnnnnnnnnnnnnnnnnnnnnnnnnnnnnnnnnnnnnnnnnnnnnnnnnnnnnnnnnnnnnnnnnnnnnnnnnnnnnnnnnnnnnnnnnnnnnnnnnnnnnnnnnnnnnnnnnnnnnnnnnnnnnnnnnnnnnnnnnnnnnnnnnnnnnnnnnnnnnnnnnnnnnnnnnnnnnnnnnnnnnnnnnnnnnnnnnnnnnnnnnnnnnnnnnnnnnnnnnnnnnnnnnnnnnnnnnnnnnnnnnnnnnnnnnnnnnnnnnnnnnnnnnnnnnnnnnnnnnnnnnnnnnnnnnnnnnnnnnnnnnnnnnnnnnnnnnnnnnnnnnnnnnnnnnnnnnnnnnnnnnnnnnnnnnnnnnnnnnnnnnnnnnnnnnnnnnnnnnnnnnnnnnnnnnnnnnnnnnnnnnnnnnnnnnnnnnnnnnnnnnnnnnnnnnnnnnnnnnnnnnnnnnnnnnnnnnnnnnnnnnnnnnnnnnnnnnnnnnnnnnnnnnnnnnnnnnnnnnnnnnnnnnnnnnnnnnnnnnnnnnnnnnnnnnnnnnnnnnnnnnnnnnnnnnnnnnnnnnnnnnnnnnnnnnnnnnnnnnnnnnnnnnnnnnnnnnnnnnnnnnnnnnnnnnnnnnnnnnnnnnnnnnnnnnnnnnnnnnnnnnnnnnnnnnnnnnnnnnnnnnnnnnnnnnnnnnnnnnnnnnnnnnnnnnnnnnnnnnnnnnnnnnnnnnnnnnnnnnnnnnnnnnnnnnnnnnnnnnnnnnnnnnnnnnnnnnnnnnnnnnnnnnnnnnnnnnnnnnnnnnnnnnnnnnnnnnnnnnnnnnnnnnnnnnnnnnnnnnnnnnnnnnnnnnnnnnnnnnnnnnnnnnnnnnnnnnnnnnnnnnnnnnnnnnnnnnnnnnnnnnnnnnnnnnnnnnnnnnnnnnnnnnnnnnnnnnnnnnnnnnnnnnnnnnnnnnnnnnnnnnnnnnnnnnnnnnnnnnnnnnnnnnnnnnnnnnnnnnnnnnnnnnnnnnnnnnnnnnnnnnnnnnnnnnnnnnnnnnnnnnnnnnnnnnnnnnnnnnnnnnnnnnnnnnnnnnnnnnnnnnnnnnnnnnnnnnnnnnnnnnnnnnnnnnnnnnnnnnnnnnnnnnnnnnnnnnnnnnnnnnnnnnnnnnnnnnnnnnnnnnnnnnnnnnnnnnnnnnnnnnnnnnnnnnnnnnnnnnnnnnnnnnnnnnnnnnnnnnnnnnnnnnnnnnnnnnnnnnnnnnnnnnnnnnnnnnnnnnnnnnnnnnnnnnnnnnnnnnnnnnnnnnnnnnnnnnnnnnnnnnnnnnnnnnnnnnnnnnnnnnnnnnnnnnnnnnnnnnnnnnnnnnnnnnnnnnnnnnnnnnnnnnnnnnnnnnnnnnnnnnnnnnnnnnnnnnnnnnnnnnnnnnnnnnnnnnnnnnnnnnnnnnnnnnnnnnnnnnnnnnnnnnnnnnnnnnnnnnnnnnnnnnnnnnnnnnnnnnnnnnnnnnnnnnnnnnnnnnnnnnnnnnnnnnnnnnnnnnnnnnnnnnnnnnnnnnnnnnnnnnnnnnnnnnnnnnnnnnnnnnnnnnnnnnnnnnnnnnnnnnnnnnnnnnnnnnnnnnnnnnnnnnnnnnnnnnnnnnnnnnnnnnnnnnnnnnnnnnnnnnnnnnnnnnnnnnnnnnnnnnnnnnnnnnnnnnnnnnnnnnnnnnnnnnnnnnnnnnnnnnnnnnnnnnnnnnnnnnnnnnnnnnnnnnnnnnnnnnnnnnnnnnnnnnnnnnnnnnnnnnnnnnnnnnnnnnnnnnnnnnnnnnnnnnnnnnnnnnnnnnnnnnnnnnnnnnnnnnnnnnnnnnnnnnnnnnnnnnnnnnnnnnnnnnnnnnnnnnnnnnnnnnnnnnnnnnnnnnnnnnnnnnnnnnnnnnnnnnnnnnnnnnnnnnnnnnnnnnnnnnnnnnnnnnnnnnnnnnnnnnnnnnnnnnnnnnnnnnnnnnnnnnnnnnnnnnnnnnnnnnnnnnnnnnnnnnnnnnnnnnnnnnnnnnnnnnnnnnnnnnnnnnnnnnnnnnnnnnnnnnnnnnnnnnnnnnnnnnnnnnnnnnnnnnnnnnnnnnnnnnnnnnnnnnnnnnnnnnnnnnnnnnnnnnnnnnnnnnnnnnnnnnnnnnnnnnnnnnnnnnnnnnnnnnnnnnnnnnnnnnnnnnnnnnnnnnnnnnnnnnnnnnnnnnnnnnnnnnnnnnnnnnnnnnnnnnnnnnnnnnnnnnnnnnnnnnnnnnnnnnnnnnnnnnnnnnnnnnnnnnnnnnnnnnnnnnnnnnnnnnnnnnnnnnnnnnnnnnnnnnnnnnnnnnnnnnnnnnnnnnnnnnnnnnnnnnnnnnnnnnnnnnnnnnnnnnnnnnnnnnnnnnnnnnnnnnnnnnnnnnnnnnnnnnnnnnnnnnnnnnnnnnnnnnnnnnnnnnnnnnnnnnnnnnnnnnnnnnnnnnnnnnnnnnnnnnnnnnnnnnnnnnnnnnnnnnnnnnnnnnnnnnnnnnnnnnnnnnnnnnnnnnnnnnnnnnnnnnnnnnnnnnnnnnnnnnnnnnnnnnnnnnnnnnnnnnnnnnnnnnnnnnnnnnnnnnnnnnnnnnnnnnnnnnnnnnnnnnnnnnnnnnnnnnnnnnnnnnnnnnnnnnnnnnnnnnnnnnnnnnnnnnnnnnnnnnnnnnnnnnnnnnnnnnnnnnnnnnnnnnnnnnnnnnnnnnnnnnnnnnnnnnnnnnnnnnnnnnnnnnnnnnnnnnnnnnnnnnnnnnnnnnnnnnnnnnnnnnnnnnnnnnnnnnnnnnnnnnnnnnnnnnnnnnnnnnnnnnnnnnnnnnnnnnnnnnnnnnnnnnnnnnnnnnnnnnnnnnnnnnnnnnnnnnnnnnnnnnnnnnnnnnnnnnnnnnnnnnnnnnnnnnnnnnnnnnnnnnnnnnnnnnnnnnnnnnnnnnnnnnnnnnnnnnnnnnnnnnnnnnnnnnnnnnnnnnnnnnnnnnnnnnnnnnnnnnnnnnnnnnnnnnnnnnnnnnnnnnnnnnnnnnnnnnnnnnnnnnnnnnnnnnnnnnnnnnnnnnnnnnnnnnnnnnnnnnnnnnnnnnnnnnnnnnnnnnnnnnnnnnnnnnnnnnnnnnnnnnnnnnnnnnnnnnnnnnnnnnnnnnnnnnnnnnnnnnnnnnnnnnnnnnnnnnnnnnnnnnnnnnnnnnnnnnnnnnnnnnnnnnnnnnnnnnnnnnnnnnnnnnnnnnnnnnnnnnnnnnnnnnnnnnnnnnnnnnnnnnnnnnnnnnnnnnnnnnnnnnnnnnnnnnnnnnnnnnnnnnnnnnnnnnnnnnnnnnnnnnnnnnnnnnnnnnnnnnnnnnnnnnnnnnnnnnnnnnnnnnnnnnnnnnnnnnnnnnnnnnnnnnnnnnnnnnnnnnnnnnnnnnnnnnnnnnnnnnnnnnnnnnnnnnnnnnnnnnnnnnnnnnnnnnnnnnnnnnnnnnnnnnnnnnnnnnnnnnnnnnnnnnnnnnnnnnnnnnnnnnnnnnnnnnnnnnnnnnnnnnnnnnnnnnnnnnnnnnnnnnnnnnnnnnnnnnnnnnnnnnnnnnnnnnnnnnnnnnnnnnnnnnnnnnnnnnnnnnnnnnnnnnnnnnnnnnnnnnnnnnnnnnnnnnnnnnnnnnnnnnnnnnnnnnnnnnnnnnnnnnnnnnnnnnnnnnnnnnnnnnnnnnnnnnnnnnnnnnnnnnnnnnnnnnnnnnnnnnnnnnnnnnnnnnnnnnnnnnnnnnnnnnnnnnnnnnnnnnnnnnnnnnnnnnnnnnnnnnnnnnnnnnnnnnnnnnnnnnnnnnnnnnnnnnnnnnnnnnnnnnnnnnnnnnnnnnnnnnnnnnnnnnnnnnnnnnnnnnnnnnnnnnnnnnnnnnnnnnnnnnnnnnnnnnnnnnnnnnnnnnnnnnnnnnnnnnnnnnnnnnnnnnnnnnnnnnnnnnnnnnnnnnnnnnnnnnnnnnnnnnnnnnnnnnnnnnnnnnnnnnnnnnnnnnnnnnnnnnnnnnnnnnnnnnnnnnnnnnnnnnnnnnnnnnnnnnnnnnnnnnnnnnnnnnnnnnnnnnnnnnnnnnnnnnnnnnnnnnnnnnnnnnnnnnnnnnnnnnnnnnnnnnnnnnnnnnnnnnnnnnnnnnnnnnnnnnnnnnnnnnnnnnnnnnnnnnnnnnnnnnnnnnnnnnnnnnnnnnnnnnnnnnnnnnnnnnnnnnnnnnnnnnnnnnnnnnnnnnnnnnnnnnnnnnnnnnnnnnnnnnnnnnnnnnnnnnnnnnnnnnnnnnnnnnnnnnnnnnnnnnnnnnnnnnnnnnnnnnnnnnnnnnnnnnnnnnnnnnnnnnnnnnnnnnnnnnnnnnnnnnnnnnnnnnnnnnnnnnnnnnnnnnnnnnnnnnnnnnnnnnnnnnnnnnnnnnnnnnnnnnnnnnnnnnnnnnnnnnnnnnnnnnnnnnnnnnnnnnnnnnnnnnnnnnnnnnnnnnnnnnnnnnnnnnnnnnnnnnnnnnnnnnnnnnnnnnnnnnnnnnnnnnnnnnnnnnnnnnnnnnnnnnnnnnnnnnnnnnnnnnnnnnnnnnnnnnnnnnnnnnnnnnnnnnnnnnnnnnnnnnnnnnnnnnnnnnnnnnnnnnnnnnnnnnnnnnnnnnnnnnnnnnnnnnnnnnnnnnnnnnnnnnnnnnnnnnnnnnnnnnnnnnnnnnnnnnnnnnnnnnnnnnnnnnnnnnnnnnnnnnnnnnnnnnnnnnnnnnnnnnnnnnnnnnnnnnnnnnnnnnnnnnnnnnnnnnnnnnnnnnnnnnnnnnnnnnnnnnnnnnnnnnnnnnnnnnnnnnnnnnnnnnnnnnnnnnnnnnnnnnnnnnnnnnnnnnnnnnnnnnnnnnnnnnnnnnnnnnnnnnnnnnnnnnnnnnnnnnnnnnnnnnnnnnnnnnnnnnnnnnnnnnnnnnnnnnnnnnnnnnnnnnnnnnnnnnnnnnnnnnnnnnnnnnnnnnnnnnnnnnnnnnnnnnnnnnnnnnnnnnnnnnnnnnnnnnnnnnnnnnnnnnnnnnnnnnnnnnnnnnnnnnnnnnnnnnnnnnnnnnnnnnnnnnnnnnnnnnnnnnnnnnnnnnnnnnnnnnnnnnnnnnnnnnnnnnnnnnnnnnnnnnnnnnnnnnnnnnnnnnnnnnnnnnnnnnnnnnnnnnnnnnnnnnnnnnnnnnnnnnnnnnnnnnnnnnnnnnnnnnnnnnnnnnnnnnnnnnnnnnnnnnnnnnnnnnnnnnnnnnnnnnnnnnnnnnnnnnnnnnnnnnnnnnnnnnnnnnnnnnnnnnnnnnnnnnnnnnnnnnnnnnnnnnnnnnnnnnnnnnnnnnnnnnnnnnnnnnnnnnnnnnnnnnnnnnnnnnnnnnnnnnnnnnnnnnnnnnnnnnnnnnnnnnnnnnnnnnnnnnnnnnnnnnnnnnnnnnnnnnnnnnnnnnnnnnnnnnnnnnnnnnnnnnnnnnnnnnnnnnnnnnnnnnnnnnnnnnnnnnnnnnnnnnnnnnnnnnnnnnnnnnnnnnnnnnnnnnnnnnnnnnnnnnnnnnnnnnnnnnnnnnnnnnnnnnnnnnnnnnnnnnnnnnnnnnnnnnnnnnnnnnnnnnnnnnnnnnnnnnnnnnnnnnnnnnnnnnnnnnnnnnnnnnnnnnnnnnnnnnnnnnnnnnnnnnnnnnnnnnnnnnnnnnnnnnnnnnnnnnnnnnnnnnnnnnnnnnnnnnnnnnnnnnnnnnnnnnnnnnnnnnnnnnnnnnnnnnnnnnnnnnnnnnnnnnnnnnnnnnnnnnnnnnnnnnnnnnnnnnnnnnnnnnnnnnnnnnnnnnnnnnnnnnnnnnnnnnnnnnnnnnnnnnnnnnnnnnnnnnnnnnnnnnnnnnnnnnnnnnnnnnnnnnnnnnnnnnnnnnnnnnnnnnnnnnnnnnnnnnnnnnnnnnnnnnnnnnnnnnnnnnnnnnnnnnnnnnnnnnnnnnnnnnnnnnnnnnnnnnnnnnnnnnnnnnnnnnnnnnnnnnnnnnnnnnnnnnnnnnnnnnnnnnnnnnnnnnnnnnnnnnnnnnnnnnnnnnnnnnnnnnnnnnnnnnnnnnnnnnnnnnnnnnnnnnnnnnnnnnnnnnnnnnnnnnnnnnnnnnnnnnnnnnnnnnnnnnnnnnnnnnnnnnnnnnnnnnnnnnnnnnnnnnnnnnnnnnnnnnnnnnnnnnnnnnnnnnnnnnnnnnnnnnnnnnnnnnnnnnnnnnnnnnnnnnnnnnnnnnnnnnnnnnnnnnnnnnnnnnnnnnnnnnnnnnnnnnnnnnnnnnnnnnnnnnnnnnnnnnnnnnnnnnnnnnnnnnnnnnnnnnnnnnnnnnnnnnnnnnnnnnnnnnnnnnnnnnnnnnnnnnnnnnnnnnnnnnnnnnnnnnnnnnnnnnnnnnnnnnnnnnnnnnnnnnnnnnnnnnnnnnnnnnnnnnnnnnnnnnnnnnnnnnnnnnnnnnnnnnnnnnnnnnnnnnnnnnnnnnnnnnnnnnnnnnnnnnnnnnnnnnnnnnnnnnnnnnnnnnnnnnnnnnnnnnnnnnnnnnnnnnnnnnnnnnnnnnnnnnnnnnnnnnnnnnnnnnnnnnnnnnnnnnnnnnnnnnnnnnnnnnnnnnnnnnnnnnnnnnnnnnnnnnnnnnnnnnnnnnnnnnnnnnnnnnnnnnnnnnnnnnnnnnnnnnnnnnnnnnnnnnnnnnnnnnnnnnnnnnnnnnnnnnnnnnnnnnnnnnnnnnnnnnnnnnnnnnnnnnnnnnnnnnnnnnnnnnnnnnnnnnnnnnnnnnnnnnnnnnnnnnnnnnnnnnnnnnnnnnnnnnnnnnnnnnnnnnnnnnnnnnnnnnnnnnnnnnnnnnnnnnnnnnnnnnnnnnnnnnnnnnnnnnnnnnnnnnnnnnnnnnnnnnnnnnnnnnnnnnnnnnnnnnnnnnnnnnnnnnnnnnnnnnnnnnnnnnnnnnnnnnnnnnnnnnnnnnnnnnnnnnnnnnnnnnnnnnnnnnnnnnnnnnnnnnnnnnnnnnnnnnnnnnnnnnnnnnnnnnnnnnnnnnnnnnnnnnnnnnnnnnnnnnnnnnnnnnnnnnnnnnnnnnnnnnnnnnnnnnnnnnnnnnnnnnnnnnnnnnnnnnnnnnnnnnnnnnnnnnnnnnnnnnnnnnnnnnnnnnnnnnnnnnnnnnnnnnnnnnnnnnnnnnnnnnnnnnnnnnnnnnnnnnnnnnnnnnnnnnnnnnnnnnnnnnnnnnnnnnnnnnnnnnnnnnnnnnnnnnnnnnnnnnnnnnnnnnnnnnnnnnnnnnnnnnnnnnnnnnnnnnnnnnnnnnnnnnnnnnnnnnnnnnnnnnnnnnnnnnnnnnnnnnnnnnnnnnnnnnnnnnnnnnnnnnnnnnnnnnnnnnnnnnnnnnnnnnnnnnnnnnnnnnnnnnnnnnnnnnnnnnnnnnnnnnnnnnnnnnnnnnnnnnnnnnnnnnnnnnnnnnnnnnnnnnnnnnnnnnnnnnnnnnnnnnnnnnnnnnnnnnnnnnnnnnnnnnnnnnnnnnnnnnnnnnnnnnnnnnnnnnnnnnnnnnnnnnnnnnnnnnnnnnnnnnnnnnnnnnnnnnnnnnnnnnnnnnnnnnnnnnnnnnnnnnnnnnnnnnnnnnnnnnnnnnnnnnnnnnnnnnnnnnnnnnnnnnnnnnnnnnnnnnnnnnnnnnnnnnnnnnnnnnnnnnnnnnnnnnnnnnnnnnnnnnnnnnnnnnnnnnnnnnnnnnnnnnnnnnnnnnnnnnnnnnnnnnnnnnnnnnnnnnnnnnnnnnnnnnnnnnnnnnnnnnnnnnnnnnnnnnnnnnnnnnnnnnnnnnnnnnnnnnnnnnnnnnnnnnnnnnnnnnnnnnnnnnnnnnnnnnnnnnnnnnnnnnnnnnnnnnnnnnnnnnnnnnnnnnnnnnnnnnnnnnnnnnnnnnnnnnnnnnnnnnnnnnnnnnnnnnnnnnnnnnnnnnnnnnnnnnnnnnnnnnnnnnnnnnnnnnnnnnnnnnnnnnnnnnnnnnnnnnnnnnnnnnnnnnnnnnnnnnnnnnnnnnnnnnnnnnnnnnnnnnnnnnnnnnnnnnnnnnnnnnnnnnnnnnnnnnnnnnnnnnnnnnnnnnnnnnnnnnnnnnnnnnnnnnnnnnnnnnnnnnnnnnnnnnnnnnnnnnnnnnnnnnnnnnnnnnnnnnnnnnnnnnnnnnnnnnnnnnnnnnnnnnnnnnnnnnnnnnnnnnnnnnnnnnnnnnnnnnnnnnnnnnnnnnnnnnnnnnnnnnnnnnnnnnnnnnnnnnnnnnnnnnnnnnnnnnnnnnnnnnnnnnnnnnnnnnnnnnnnnnnnnnnnnnnnnnnnnnnnnnnnnnnnnnnnnnnnnnnnnnnnnnnnnnnnnnnnnnnnnnnnnnnnnnnnnnnnnnnnnnnnnnnnnnnnnnnnnnnnnnnnnnnnnnnnnnnnnnnnnnnnnnnnnnnnnnnnnnnnnnnnnnnnnnnnnnnnnnnnnnnnnnnnnnnnnnnnnnnnnnnnnnnnnnnnnnnnnnnnnnnnnnnnnnnnnnnnnnnnnnnnnnnnnnnnnnnnnnnnnnnnnnnnnnnnnnnnnnnnnnnnnnnnnnnnnnnnnnnnnnnnnnnnnnnnnnnnnnnnnnnnnnnnnnnnnnnnnnnnnnnnnnnnnnnnnnnnnnnnnnnnnnnnnnnnnnnnnnnnnnnnnnnnnnnnnnnnnnnnnnnnnnnnnnnnnnnnnnnnnnnnnnnnnnnnnnnnnnnnnnnnnnnnnnnnnnnnnnnnnnnnnnnnnnnnnnnnnnnnnnnnnnnnnnnnnnnnnnnnnnnnnnnnnnnnnnnnnnnnnnnnnnnnnnnnnnnnnnnnnnnnnnnnnnnnnnnnnnnnnnnnnnnnnnnnnnnnnnnnnnnnnnnnnnnnnnnnnnnnnnnnnnnnnnnnnnnnnnnnnnnnnnnnnnnnnnnnnnnnnnnnnnnnnnnnnnnnnnnnnnnnnnnnnnnnnnnnnnnnnnnnnnnnnnnnnnnnnnnnnnnnnnnnnnnnnnnnnnnnnnnnnnnnnnnnnnnnnnnnnnnnnnnnnnnnnnnnnnnnnnnnnnnnnnnnnnnnnnnnnnnnnnnnnnnnnnnnnnnnnnnnnnnnnnnnnnnnnnnnnnnnnnnnnnnnnnnnnnnnnnnnnnnnnnnnnnnnnnnnnnnnnnnnnnnnnnnnnnnnnnnnnnnnnnnnnnnnnnnnnnnnnnnnnnnnnnnnnnnnnnnnnnnnnnnnnnnnnnnnnnnnnnnnnnnnnnnnnnnnnnnnnnnnnnnnnnnnnnnnnnnnnnnnnnnnnnnnnnnnnnnnnnnnnnnnnnnnnnnnnnnnnnnnnnnnnnnnnnnnnnnnnnnnnnnnnnnnnnnnnnnnnnnnnnnnnnnnnnnnnnnnnnnnnnnnnnnnnnnnnnnnnnnnnnnnnnnnnnnnnnnnnnnnnnnnnnnnnnnnnnnnnnnnnnnnnnnnnnnnnnnnnnnnnnnnnnnnnnnnnnnnnnnnnnnnnnnnnnnnnnnnnnnnnnnnnnnnnnnnnnnnnnnnnnnnnnnnnnnnnnnnnnnnnnnnnnnnnnnnnnnnnnnnnnnnnnnnnnnnnnnnnnnnnnnnnnnnnnnnnnnnnnnnnnnnnnnnnnnnnnnnnnnnnnnnnnnnnnnnnnnnnnnnnnnnnnnnnnnnnnnnnnnnnnnnnnnnnnnnnnnnnnnnnnnnnnnnnnnnnnnnnnnnnnnnnnnnnnnnnnnnnnnnnnnnnnnnnnnnnnnnnnnnnnnnnnnnnnnnnnnnnnnnnnnnnnnnnnnnnnnnnnnnnnnnnnnnnnnnnnnnnnnnnnnnnnnnnnnnnnnnnnnnnnnnnnnnnnnnnnnnnnnnnnnnnnnnnnnnnnnnnnnnnnnnnnnnnnnnnnnnnnnnnnnnnnnnnnnnnnnnnnnnnnnnnnnnnnnnnnnnnnnnnnnnnnnnnnnnnnnnnnnnnnnnnnnnnnnnnnnnnnnnnnnnnnnnnnnnnnnnnnnnnnnnnnnnnnnnnnnnnnnnnnnnnnnnnnnnnnnnnnnnnnnnnnnnnnnnnnnnnnnnnnnnnnnnnnnnnnnnnnnnnnnnnnnnnnnnnnnnnnnnnnnnnnnnnnnnnnnnnnnnnnnnnnnnnnnnnnnnnnnnnnnnnnnnnnnnnnnnnnnnnnnnnnnnnnnnnnnnnnnnnnnnnnnnnnnnnnnnnnnnnnnnnnnnnnnnnnnnnnnnnnnnnnnnnnnnnnnnnnnnnnnnnnnnnnnnnnnnnnnnnnnnnnnnnnnnnnnnnnnnnnnnnnnnnnnnnnnnnnnnnnnnnnnnnnnnnnnnnnnnnnnnnnnnnnnnnnnnnnnnnnnnnnnnnnnnnnnnnnnnnnnnnnnnnnnnnnnnnnnnnnnnnnnnnnnnnnnnnnnnnnnnnnnnnnnnnnnnnnnnnnnnnnnnnnnnnnnnnnnnnnnnnnnnnnnnnnnnnnnnnnnnnnnnnnnnnnnnnnnnnnnnnnnnnnnnnnnnnnnnnnnnnnnnnnnnnnnnnnnnnnnnnnnnnnnnnnnnnnnnnnnnnnnnnnnnnnnnnnnnnnnnnnnnnnnnnnnnnnnnnnnnnnnnnnnnnnnnnnnnnnnnnnnnnnnnnnnnnnnnnnnnnnnnnnnnnnnnnnnnnnnnnnnnnnnnnnnnnnnnnnnnnnnnnnnnnnnnnnnnnnnnnnnnnnnnnnnnnnnnnnnnnnnnnnnnnnnnnnnnnnnnnnnnnnnnnnnnnnnnnnnnnnnnnnnnnnnnnnnnnnnnnnnnnnnnnnnnnnnnnnnnnnnnnnnnnnnnnnnnnnnnnnnnnnnnnnnnnnnnnnnnnnnnnnnnnnnnnnnnnnnnnnnnnnnnnnnnnnnnnnnnnnnnnnnnnnnnnnnnnnnnnnnnnnnnnnnnnnnnnnnnnnnnnnnnnnnnnnnnnnnnnnnnnnnnnnnnnnnnnnnnnnnnnnnnnnnnnnnnnnnnnnnnnnnnnnnnnnnnnnnnnnnnnnnnnnnnnnnnnnnnnnnnnnnnnnnnnnnnnnnnnnnnnnnnnnnnnnnnnnnnnnnnnnnnnnnnnnnnnnnnnnnnnnnnnnnnnnnnnnnnnnnnnnnnnnnnnnnnnnnnnnnnnnnnnnnnnnnnnnnnnnnnnnnnnnnnnnnnnnnnnnnnnnnnnnnnnnnnnnnnnnnnnnnnnnnnnnnnnnnnnnnnnnnnnnnnnnnnnnnnnnnnnnnnnnnnnnnnnnnnnnnnnnnnnnnnnnnnnnnnnnnnnnnnnnnnnnnnnnnnnnnnnnnnnnnnnnnnnnnnnnnnnnnnnnnnnnnnnnnnnnnnnnnnnnnnnnnnnnnnnnnnnnnnnnnnnnnnnnnnnnnnnnnnnnnnnnnnnnnnnnnnnnnnnnnnnnnnnnnnnnnnnnnnnnnnnnnnnnnnnnnnnnnnnnnnnnnnnnnnnnnnnnnnnnnnnnnnnnnnnnnnnnnnnnnnnnnnnnnnnnnnnnnnnnnnnnnnnnnnnnnnnnnnnnnnnnnnnnnnnnnnnnnnnnnnnnnnnnnnnnnnnnnnnnnnnnnnnnnnnnnnnnnnnnnnnnnnnnnnnnnnnnnnnnnnnnnnnnnnnnnnnnnnnnnnnnnnnnnnnnnnnnnnnnnnnnnnnnnnnnnnnnnnnnnnnnnnnnnnnnnnnnnnnnnnnnnnnnnnnnnnnnnnnnnnnnnnnnnnnnnnnnnnnnnnnnnnnnnnnnnnnnnnnnnnnnnnnnnnnnnnnnnnnnnnnnnnnnnnnnnnnnnnnnnnnnnnnnnnnnnnnnnnnnnnnnnnnnnnnnnnnnnnnnnnnnnnnnnnnnnnnnnnnnnnnnnnnnnnnnnnnnnnnnnnnnnnnnnnnnnnnnnnnnnnnnnnnnnnnnnnnnnnnnnnnnnnnnnnnnnnnnnnnnnnnnnnnnnnnnnnnnnnnnnnnnnnnnnnnnnnnnnnnnnnnnnnnnnnnnnnnnnnnnnnnnnnnnnnnnnnnnnnnnnnnnnnnnnnnnnnnnnnnnnnnnnnnnnnnnnnnnnnnnnnnnnnnnnnnnnnnnnnnnnnnnnnnnnnnnnnnnnnnnnnnnnnnnnnnnnnnnnnnnnnnnnnnnnnnnnnnnnnnnnnnnnnnnnnnnnnnnnnnnnnnnnnnnnnnnnnnnnnnnnnnnnnnnnnnnnnnnnnnnnnnnnnnnnnnnnnnnnnnnnnnnnnnnnnnnnnnnnnnnnnnnnnnnnnnnnnnnnnnnnnnnnnnnnnnnnnnnnnnnnnnnnnnnnnnnnnnnnnnnnnnnnnnnnnnnnnnnnnnnnnnnnnnnnnnnnnnnnnnnnnnnnnnnnnnnnnnnnnnnnnnnnnnnnnnnnnnnnnnnnnnnnnnnnnnnnnnnnnnnnnnnnnnnnnnnnnnnnnnnnnnnnnnnnnnnnnnnnnnnnnnnnnnnnnnnnnnnnnnnnnnnnnnnnnnnnnnnnnnnnnnnnnnnnnnnnnnnnnnnnnnnnnnnnnnnnnnnnnnnnnnnnnnnnnnnnnnnnnnnnnnnnnnnnnnnnnnnnnnnnnnnnnnnnnnnnnnnnnnnnnnnnnnnnnnnnnnnnnnnnnnnnnnnnnnnnnnnnnnnnnnnnnnnnnnnnnnnnnnnnnnnnnnnnnnnnnnnnnnnnnnnnnnnnnnnnnnnnnnnnnnnnnnnnnnnnnnnnnnnnnnnnnnnnnnnnnnnnnnnnnnnnnnnnnnnnnnnnnnnnnnnnnnnnnnnnnnnnnnnnnnnnnnnnnnnnnnnnnnnnnnnnnnnnnnnnnnnnnnnnnnnnnnnnnnnnnnnnnnnnnnnnnnnnnnnnnnnnnnnnnnnnnnnnnnnnnnnnnnnnnnnnnnnnnnnnnnnnnnnnnnnnnnnnnnnnnnnnnnnnnnnnnnnnnnnnnnnnnnnnnnnnnnnnnnnnnnnnnnnnnnnnnnnnnnnnnnnnnnnnnnnnnnnnnnnnnnnnnnnnnnnnnnnnnnnnnnnnnnnnnnnnnnnnnnnnnnnnnnnnnnnnnnnnnnnnnnnnnnnnnnnnnnnnnnnnnnnnnnnnnnnnnnnnnnnnnnnnnnnnnnnnnnnnnnnnnnnnnnnnnnnnnnnnnnnnnnnnnnnnnnnnnnnnnnnnnnnnnnnnnnnnnnnnnnnnnnnnnnnnnnnnnnnnnnnnnnnnnnnnnnnnnnnnnnnnnnnnnnnnnnnnnnnnnnnnnnnnnnnnnnnnnnnnnnnnnnnnnnnnnnnnnnnnnnnnnnnnnnnnnnnnnnnnnnnnnnnnnnnnnnnnnnnnnnnnnnnnnnnnnnnnnnnnnnnnnnnnnnnnnnnnnnnnnnnnnnnnnnnnnnnnnnnnnnnnnnnnnnnnnnnnnnnnnnnnnnnnnnnnnnnnnnnnnnnnnnnnnnnnnnnnnnnnnnnnnnnnnnnnnnnnnnnnnnnnnnnnnnnnnnnnnnnnnnnnnnnnnnnnnnnnnnnnnnnnnnnnnnnnnnnnnnnnnnnnnnnnnnnnnnnnnnnnnnnnnnnnnnnnnnnnnnnnnnnnnnnnnnnnnnnnnnnnnnnnnnnnnnnnnnnnnnnnnnnnnnnnnnnnnnnnnnnnnnnnnnnnnnnnnnnnnnnnnnnnnnnnnnnnnnnnnnnnnnnnnnnnnnnnnnnnnnnnnnnnnnnnnnnnnnnnnnnnnnnnnnnnnnnnnnnnnnnnnnnnnnnnnnnnnnnnnnnnnnnnnnnnnnnnnnnnnnnnnnnnnnnnnnnnnnnnnnnnnnnnnnnnnnnnnnnnnnnnnnnnnnnnnnnnnnnnnnnnnnnnnnnnnnnnnnnnnnnnnnnnnnnnnnnnnnnnnnnnnnnnnnnnnnnnnnnnnnnnnnnnnnnnnnnnnnnnnnnnnnnnnnnnnnnnnnnnnnnnnnnnnnnnnnnnnnnnnnnnnnnnnnnnnnnnnnnnnnnnnnnnnnnnnnnnnnnnnnnnnnnnnnnnnnnnnnnnnnnnnnnnnnnnnnnnnnnnnnnnnnnnnnnnnnnnnnnnnnnnnnnnnnnnnnnnnnnnnnnnnnnnnnnnnnnnnnnnnnnnnnnnnnnnnnnnnnnnnnnnnnnnnnnnnnnnnnnnnnnnnnnnnnnnnnnnnnnnnnnnnnnnnnnnnnnnnnnnnnnnnnnnnnnnnnnnnnnnnnnnnnnnnnnnnnnnnnnnnnnnnnnnnnnnnnnnnnnnnnnnnnnnnnnnnnnnnnnnnnnnnnnnnnnnnnnnnnnnnnnnnnnnnnnnnnnnnnnnnnnnnnnnnnnnnnnnnnnnnnnnnnnnnnnnnnnnnnnnnnnnnnnnnnnnnnnnnnnnnnnnnnnnnnnnnnnnnnnnnnnnnnnnnnnnnnnnnnnnnnnnnnnnnnnnnnnnnnnnnnnnnnnnnnnnnnnnnnnnnnnnnnnnnnnnnnnnnnnnnnnnnnnnnnnnnnnnnnnnnnnnnnnnnnnnnnnnnnnnnnnnnnnnnnnnnnnnnnnnnnnnnnnnnnnnnnnnnnnnnnnnnnnnnnnnnnnnnnnnnnnnnnnnnnnnnnnnnnnnnnnnnnnnnnnnnnnnnnnnnnnnnnnnnnnnnnnnnnnnnnnnnnnnnnnnnnnnnnnnnnnnnnnnnnnnnnnnnnnnnnnnnnnnnnnnnnnnnnnnnnnnnnnnnnnnnnnnnnnnnnnnnnnnnnnnnnnnnnnnnnnnnnnnnnnnnnnnnnnnnnnnnnnnnnnnnnnnnnnnnnnnnnnnnnnnnnnnnnnnnnnnnnnnnnnnnnnnnnnnnnnnnnnnnnnnnnnnnnnnnnnnnnnnnnnnnnnnnnnnnnnnnnnnnnnnnnnnnnnnnnnnnnnnnnnnnnnnnnnnnnnnnnnnnnnnnnnnnnnnnnnnnnnnnnnnnnnnnnnnnnnnnnnnnnnnnnnnnnnnnnnnnnnnnnnnnnnnnnnnnnnnnnnnnnnnnnnnnnnnnnnnnnnnnnnnnnnnnnnnnnnnnnnnnnnnnnnnnnnnnnnnnnnnnnnnnnnnnnnnnnnnnnnnnnnnnnnnnnnnnnnnnnnnnnnnnnnnnnnnnnnnnnnnnnnnnnnnnnnnnnnnnnnnnnnnnnnnnnnnnnnnnnnnnnnnnnnnnnnnnnnnnnnnnnnnnnnnnnnnnnnnnnnnnnnnnnnnnnnnnnnnnnnnnnnnnnnnnnnnnnnnnnnnnnnnnnnnnnnnnnnnnnnnnnnnnnnnnnnnnnnnnnnnnnnnnnnnnnnnnnnnnnnnnnnnnnnnnnnnnnnnnnnnnnnnnnnnnnnnnnnnnnnnnnnnnnnnnnnnnnnnnnnnnnnnnnnnnnnnnnnnnnnnnnnnnnnnnnnnnnnnnnnnnnnnnnnnnnnnnnnnnnnnnnnnnnnnnnnnnnnnnnnnnnnnnnnnnnnnnnnnnnnnnnnnnnnnnnnnnnnnnnnnnnnnnnnnnnnnnnnnnnnnnnnnnnnnnnnnnnnnnnnnnnnnnnnnnnnnnnnnnnnnnnnnnnnnnnnnnnnnnnnnnnnnnnnnnnnnnnnnnnnnnnnnnnnnnnnnnnnnnnnnnnnnnnnnnnnnnnnnnnnnnnnnnnnnnnnnnnnnnnnnnnnnnnnnnnnnnnnnnnnnnnnnnnnnnnnnnnnnnnnnnnnnnnnnnnnnnnnnnnnnnnnnnnnnnnnnnnnnnnnnnnnnnnnnnnnnnnnnnnnnnnnnnnnnnnnnnnnnnnnnnnnnnnnnnnnnnnnnnnnnnnnnnnnnnnnnnnnnnnnnnnnnnnnnnnnnnnnnnnnnnnnnnnnnnnnnnnnnnnnnnnnnnnnnnnnnnnnnnnnnnnnnnnnnnnnnnnnnnnnnnnnnnnnnnnnnnnnnnnnnnnnnnnnnnnnnnnnnnnnnnnnnnnnnnnnnnnnnnnnnnnnnnnnnnnnnnnnnnnnnnnnnnnnnnnnnnnnnnnnnnnnnnnnnnnnnnnnnnnnnnnnnnnnnnnnnnnnnnnnnnnnnnnnnnnnnnnnnnnnnnnnnnnnnnnnnnnnnnnnnnnnnnnnnnnnnnnnnnnnnnnnnnnnnnnnnnnnnnnnnnnnnnnnnnnnnnnnnnnnnnnnnnnnnnnnnnnnnnnnnnnnnnnnnnnnnnnnnnnnnnnnnnnnnnnnnnnnnnnnnnnnnnnnnnnnnnnnnnnnnnnnnnnnnnnnnnnnnnnnnnnnnnnnnnnnnnnnnnnnnnnnnnnnnnnnnnnnnnnnnnnnnnnnnnnnnnnnnnnnnnnnnnnnnnnnnnnnnnnnnnnnnnnnnnnnnnnnnnnnnnnnnnnnnnnnnnnnnnnnnnnnnnnnnnnnnnnnnnnnnnnnnnnnnnnnnnnnnnnnnnnnnnnnnnnnnnnnnnnnnnnnnnnnnnnnnnnnnnnnnnnnnnnnnnnnnnnnnnnnnnnnnnnnnnnnnnnnnnnnnnnnnnnnnnnnnnnnnnnnnnnnnnnnnnnnnnnnnnnnnnnnnnnnnnnnnnnnnnnnnnnnnnnnnnnnnnnnnnnnnnnnnnnnnnnnnnnnnnnnnnnnnnnnnnnnnnnnnnnnnnnnnnnnnnnnnnnnnnnnnnnnnnnnnnnnnnnnnnnnnnnnnnnnnnnnnnnnnnnnnnnnnnnnnnnnnnnnnnnnnnnnnnnnnnnnnnnnnnnnnnnnnnnnnnnnnnnnnnnnnnnnnnnnnnnnnnnnnnnnnnnnnnnnnnnnnnnnnnnnnnnnnnnnnnnnnnnnnnnnnnnnnnnnnnnnnnnnnnnnnnnnnnnnnnnnnnnnnnnnnnnnnnnnnnnnnnnnnnnnnnnnnnnnnnnnnnnnnnnnnnnnnnnnnnnnnnnnnnnnnnnnnnnnnnnnnnnnnnnnnnnnnnnnnnnnnnnnnnnnnnnnnnnnnnnnnnnnnnnnnnnnnnnnnnnnnnnnnnnnnnnnnnnnnnnnnnnnnnnnnnnnnnnnnnnnnnnnnnnnnnnnnnnnnnnnnnnnnnnnnnnnnnnnnnnnnnnnnnnnnnnnnnnnnnnnnnnnnnnnnnnnnnnnnnnnnnnnnnnnnnnnnnnnnnnnnnnnnnnnnnnnnnnnnnnnnnnnnnnnnnnnnnnnnnnnnnnnnnnnnnnnnnnnnnnnnnnnnnnnnnnnnnnnnnnnnnnnnnnnnnnnnnnnnnnnnnnnnnnnnnnnnnnnnnnnnnnnnnnnnnnnnnnnnnnnnnnnnnnnnnnnnnnnnnnnnnnnnnnnnnnnnnnnnnnnnnnnnnnnnnnnnnnnnnnnnnnnnnnnnnnnnnnnnnnnnnnnnnnnnnnnnnnnnnnnnnnnnnnnnnnnnnnnnnnnnnnnnnnnnnnnnnnnnnnnnnnnnnnnnnnnnnnnnnnnnnnnnnnnnnnnnnnnnnnnnnnnnnnnnnnnnnnnnnnnnnnnnnnnnnnnnnnnnnnnnnnnnnnnnnnnnnnnnnnnnnnnnnnnnnnnnnnnnnnnnnnnnnnnnnnnnnnnnnnnnnnnnnnnnnnnnnnnnnnnnnnnnnnnnnnnnnnnnnnnnnnnnnnnnnnnnnnnnnnnnnnnnnnnnnnnnnnnnnnnnnnnnnnnnnnnnnnnnnnnnnnnnnnnnnnnnnnnnnnnnnnnnnnnnnnnnnnnnnnnnnnnnnnnnnnnnnnnnnnnnnnnnnnnnnnnnnnnnnnnnnnnnnnnnnnnnnnnnnnnnnnnnnnnnnnnnnnnnnnnnnnnnnnnnnnnnnnnnnnnnnnnnnnnnnnnnnnnnnnnnnnnnnnnnnnnnnnnnnnnnnnnnnnnnnnnnnnnnnnnnnnnnnnnnnnnnnnnnnnnnnnnnnnnnnnnnnnnnnnnnnnnnnnnnnnnnnnnnnnnnnnnnnnnnnnnnnnnnnnnnnnnnnnnnnnnnnnnnnnnnnnnnnnnnnnnnnnnnnnnnnnnnnnnnnnnnnnnnnnnnnnnnnnnnnnnnnnnnnnnnnnnnnnnnnnnnnnnnnnnnnnnnnnnnnnnnnnnnnnnnnnnnnnnnnnnnnnnnnnnnnnnnnnnnnnnnnnnnnnnnnnnnnnnnnnnnnnnnnnnnnnnnnnnnnnnnnnnnnnnnnnnnnnnnnnnnnnnnnnnnnnnnnnnnnnnnnnnnnnnnnnnnnnnnnnnnnnnnnnnnnnnnnnnnnnnnnnnnnnnnnnnnnnnnnnnnnnnnnnnnnnnnnnnnnnnnnnnnnnnnnnnnnnnnnnnnnnnnnnnnnnnnnnnnnnnnnnnnnnnnnnnnnnnnnnnnnnnnnnnnnnnnnnnnnnnnnnnnnnnnnnnnnnnnnnnnnnnnnnnnnnnnnnnnnnnnnnnnnnnnnnnnnnnnnnnnnnnnnnnnnnnnnnnnnnnnnnnnnnnnnnnnnnnnnnnnnnnnnnnnnnnnnnnnnnnnnnnnnnnnnnnnnnnnnnnnnnnnnnnnnnnnnnnnnnnnnnnnnnnnnnnnnnnnnnnnnnnnnnnnnnnnnnnnnnnnnnnnnnnnnnnnnnnnnnnnnnnnnnnnnnnnnnnnnnnnnnnnnnnnnnnnnnnnnnnnnnnnnnnnnnnnnnnnnnnnnnnnnnnnnnnnnnnnnnnnnnnnnnnnnnnnnnnnnnnnnnnnnnnnnnnnnnnnnnnnnnnnnnnnnnnnnnnnnnnnnnnnnnnnnnnnnnnnnnnnnnnnnnnnnnnnnnnnnnnnnnnnnnnnnnnnnnnnnnnnnnnnnnnnnnnnnnnnnnnnnnnnnnnnnnnnnnnnnnnnnnnnnnnnnnnnnnnnnnnnnnnnnnnnnnnnnnnnnnnnnnnnnnnnnnnnnnnnnnnnnnnnnnnnnnnnnnnnnnnnnnnnnnnnnnnnnnnnnnnnnnnnnnnnnnnnnnnnnnnnnnnnnnnnnnnnnnnnnnnnnnnnnnnnnnnnnnnnnnnnnnnnnnnnnnnnnnnnnnnnnnnnnnnnnnnnnnnnnnnnnnnnnnnnnnnnnnnnnnnnnnnnnnnnnnnnnnnnnnnnnnnnnnnnnnnnnnnnnnnnnnnnnnnnnnnnnnnnnnnnnnnnnnnnnnnnnnnnnnnnnnnnnnnnnnnnnnnnnnnnnnnnnnnnnnnnnnnnnnnnnnnnnnnnnnnnnnnnnnnnnnnnnnnnnnnnnnnnnnnnnnnnnnnnnnnnnnnnnnnnnnnnnnnnnnnnnnnnnnnnnnnnnnnnnnnnnnnnnnnnnnnnnnnnnnnnnnnnnnnnnnnnnnnnnnnnnnnnnnnnnnnnnnnnnnnnnnnnnnnnnnnnnnnnnnnnnnnnnnnnnnnnnnnnnnnnnnnnnnnnnnnnnnnnnnnnnnnnnnnnnnnnnnnnnnnnnnnnnnnnnnnnnnnnnnnnnnnnnnnnnnnnnnnnnnnnnnnnnnnnnnnnnnnnnnnnnnnnnnnnnnnnnnnnnnnnnnnnnnnnnnnnnnnnnnnnnnnnnnnnnnnnnnnnnnnnnnnnnnnnnnnnnnnnnnnnnnnnnnnnnnnnnnnnnnnnnnnnnnnnnnnnnnnnnnnnnnnnnnnnnnnnnnnnnnnnnnnnnnnnnnnnnnnnnnnnnnnnnnnnnnnnnnnnnnnnnnnnnnnnnnnnnnnnnnnnnnnnnnnnnnnnnnnnnnnnnnnnnnnnnnnnnnnnnnnnnnnnnnnnnnnnnnnnnnnnnnnnnnnnnnnnnnnnnnnnnnnnnnnnnnnnnnnnnnnnnnnnnnnnnnnnnnnnnnnnnnnnnnnnnnnnnnnnnnnnnnnnnnnnnnnnnnnnnnnnnnnnnnnnnnnnnnnnnnnnnnnnnnnnnnnnnnnnnnnnnnnnnnnnnnnnnnnnnnnnnnnnnnnnnnnnnnnnnnnnnnnnnnnnnnnnnnnnnnnnnnnnnnnnnnnnnnnnnnnnnnnnnnnnnnnnnnnnnnnnnnnnnnnnnnnnnnnnnnnnnnnnnnnnnnnnnnnnnnnnnnnnnnnnnnnnnnnnnnnnnnnnnnnnnnnnnnnnnnnnnnnnnnnnnnnnnnnnnnnnnnnnnnnnnnnnnnnnnnnnnnnnnnnnnnnnnnnnnnnnnnnnnnnnnnnnnnnnnnnnnnnnnnnnnnnnnnnnnnnnnnnnnnnnnnnnnnnnnnnnnnnnnnnnnnnnnnnnnnnnnnnnnnnnnnnnnnnnnnnnnnnnnnnnnnnnnnnnnnnnnnnnnnnnnnnnnnnnnnnnnnnnnnnnnnnnnnnnnnnnnnnnnnnnnnnnnnnnnnnnnnnnnnnnnnnnnnnnnnnnnnnnnnnnnnnnnnnnnnnnnnnnnnnnnnnnnnnnnnnnnnnnnnnnnnnnnnnnnnnnnnnnnnnnnnnnnnnnnnnnnnnnnnnnnnnnnnnnnnnnnnnnnnnnnnnnnnnnnnnnnnnnnnnnnnnnnnnnnnnnnnnnnnnnnnnnnnnnnnnnnnnnnnnnnnnnnnnnnnnnnnnnnnnnnnnnnnnnnnnnnnnnnnnnnnnnnnnnnnnnnnnnnnnnnnnnnnnnnnnnnnnnnnnnnnnnnnnnnnnnnnnnnnnnnnnnnnnnnnnnnnnnnnnnnnnnnnnnnnnnnnnnnnnnnnnnnnnnnnnnnnnnnnnnnnnnnnnnnnnnnnnnnnnnnnnnnnnnnnnnnnnnnnnnnnnnnnnnnnnnnnnnnnnnnnnnnnnnnnnnnnnnnnnnnnnnnnnnnnnnnnnnnnnnnnnnnnnnnnnnnnnnnnnnnnnnnnnnnnnnnnnnnnnnnnnnnnnnnnnnnnnnnnnnnnnnnnnnnnnnnnnnnnnnnnnnnnnnnnnnnnnnnnnnnnnnnnnnnnnnnnnnnnnnnnnnnnnnnnnnnnnnnnnnnnnnnnnnnnnnnnnnnnnnnnnnnnnnnnnnnnnnnnnnnnnnnnnnnnnnnnnnnnnnnnnnnnnnnnnnnnnnnnnnnnnnnnnnnnnnnnnnnnnnnnnnnnnnnnnnnnnnnnnnnnnnnnnnnnnnnnnnnnnnnnnnnnnnnnnnnnnnnnnnnnnnnnnnnnnnnnnnnnnnnnnnnnnnnnnnnnnnnnnnnnnnnnnnnnnnnnnnnnnnnnnnnnnnnnnnnnnnnnnnnnnnnnnnnnnnnnnnnnnnnnnnnnnnnnnnnnnnnnnnnnnnnnnnnnnnnnnnnnnnnnnnnnnnnnnnnnnnnnnnnnnnnnnnnnnnnnnnnnnnnnnnnnnnnnnnnnnnnnnnnnnnnnnnnnnnnnnnnnnnnnnnnnnnnnnnnnnnnnnnnnnnnnnnnnnnnnnnnnnnnnnnnnnnnnnnnnnnnnnnnnnnnnnnnnnnnnnnnnnnnnnnnnnnnnnnnnnnnnnnnnnnnnnnnnnnnnnnnnnnnnnnnnnnnnnnnnnnnnnnnnnnnnnnnnnnnnnnnnnnnnnnnnnnnnnnnnnnnnnnnnnnnnnnnnnnnnnnnnnnnnnnnnnnnnnnnnnnnnnnnnnnnnnnnnnnnnnnnnnnnnnnnnnnnnnnnnnnnnnnnnnnnnnnnnnnnnnnnnnnnnnnnnnnnnnnnnnnnnnnnnnnnnnnnnnnnnnnnnnnnnnnnnnnnnnnnnnnnnnnnnnnnnnnnnnnnnnnnnnnnnnnnnnnnnnnnnnnnnnnnnnnnnnnnnnnnnnnnnnnnnnnnnnnnnnnnnnnnnnnnnnnnnnnnnnnnnnnnnnnnnnnnnnnnnnnnnnnnnnnnnnnnnnnnnnnnnnnnnnnnnnnnnnnnnnnnnnnnnnnnnnnnnnnnnnnnnnnnnnnnnnnnnnnnnnnnnnnnnnnnnnnnnnnnnnnnnnnnnnnnnnnnnnnnnnnnnnnnnnnnnnnnnnnnnnnnnnnnnnnnnnnnnnnnnnnnnnnnnnnnnnnnnnnnnnnnnnnnnnnnnnnnnnnnnnnnnnnnnnnnnnnnnnnnnnnnnnnnnnnnnnnnnnnnnnnnnnnnnnnnnnnnnnnnnnnnnnnnnnnnnnnnnnnnnnnnnnnnnnnnnnnnnnnnnnnnnnnnnnnnnnnnnnnnnnnnnnnnnnnnnnnnnnnnnnnnnnnnnnnnnnnnnnnnnnnnnnnnnnnnnnnnnnnnnnnnnnnnnnnnnnnnnnnnnnnnnnnnnnnnnnnnnnnnnnnnnnnnnnnnnnnnnnnnnnnnnnnnnnnnnnnnnnnnnnnnnnnnnnnnnnnnnnnnnnnnnnnnnnnnnnnnnnnnnnnnnnnnnnnnnnnnnnnnnnnnnnnnnnnnnnnnnnnnnnnnnnnnnnnnnnnnnnnnnnnnnnnnnnnnnnnnnnnnnnnnnnnnnnnnnnnnnnnnnnnnnnnnnnnnnnnnnnnnnnnnnnnnnnnnnnnnnnnnnnnnnnnnnnnnnnnnnnnnnnnnnnnnnnnnnnnnnnnnnnnnnnnnnnnnnnnnnnnnnnnnnnnnnnnnnnnnnnnnnnnnnnnnnnnnnnnnnnnnnnnnnnnnnnnnnnnnnnnnnnnnnnnnnnnnnnnnnnnnnnnnnnnnnnnnnnnnnnnnnnnnnnnnnnnnnnnnnnnnnnnnnnnnnnnnnnnnnnnnnnnnnnnnnnnnnnnnnnnnnnnnnnnnnnnnnnnnnnnnnnnnnnnnnnnnnnnnnnnnnnnnnnnnnnnnnnnnnnnnnnnnnnnnnnnnnnnnnnnnnnnnnnnnnnnnnnnnnnnnnnnnnnnnnnnnnnnnnnnnnnnnnnnnnnnnnnnnnnnnnnnnnnnnnnnnnnnnnnnnnnnnnnnnnnnnnnnnnnnnnnnnnnnnnnnnnnnnnnnnnnnnnnnnnnnnnnnnnnnnnnnnnnnnnnnnnnnnnnnnnnnnnnnnnnnnnnnnnnnnnnnnnnnnnnnnnnnnnnnnnnnnnnnnnnnnnnnnnnnnnnnnnnnnnnnnnnnnnnnnnnnnnnnnnnnnnnnnnnnnnnnnnnnnnnnnnnnnnnnnnnnnnnnnnnnnnnnnnnnnnnnnnnnnnnnnnnnnnnnnnnnnnnnnnnnnnnnnnnnnnnnnnnnnnnnnnnnnnnnnnnnnnnnnnnnnnnnnnnnnnnnnnnnnnnnnnnnnnnnnnnnnnnnnnnnnnnnnnnnnnnnnnnnnnnnnnnnnnnnnnnnnnnnnnnnnnnnnnnnnnnnnnnnnnnnnnnnnnnnnnnnnnnnnnnnnnnnnnnnnnnnnnnnnnnnnnnnnnnnnnnnnnnnnnnnnnnnnnnnnnnnnnnnnnnnnnnnnnnnnnnnnnnnnnnnnnnnnnnnnnnnnnnnnnnnnnnnnnnnnnnnnnnnnnnnnnnnnnnnnnnnnnnnnnnnnnnnnnnnnnnnnnnnnnnnnnnnnnnnnnnnnnnnnnnnnnnnnnnnnnnnnnnnnnnnnnnnnnnnnnnnnnnnnnnnnnnnnnnnnnnnnnnnnnnnnnnnnnnnnnnnnnnnnnnnnnnnnnnnnnnnnnnnnnnnnnnnnnnnnnnnnnnnnnnnnnnnnnnnnnnnnnnnnnnnnnnnnnnnnnnnnnnnnnnnnnnnnnnnnnnnnnnnnnnnnnnnnnnnnnnnnnnnnnnnnnnnnnnnnnnnnnnnnnnnnnnnnnnnnnnnnnnnnnnnnnnnnnnnnnnnnnnnnnnnnnnnnnnnnnnnnnnnnnnnnnnnnnnnnnnnnnnnnnnnnnnnnnnnnnnnnnnnnnnnnnnnnnnnnnnnnnnnnnnnnnnnnnnnnnnnnnnnnnnnnnnnnnnnnnnnnnnnnnnnnnnnnnnnnnnnnnnnnnnnnnnnnnnnnnnnnnnnnnnnnnnnnnnnnnnnnnnnnnnnnnnnnnnnnnnnnnnnnnnnnnnnnnnnnnnnnnnnnnnnnnnnnnnnnnnnnnnnnnnnnnnnnnnnnnnnnnnnnnnnnnnnnnnnnnnnnnnnnnnnnnnnnnnnnnnnnnnnnnnnnnnnnnnnnnnnnnnnnnnnnnnnnnnnnnnnnnnnnnnnnnnnnnnnnnnnnnnnnnnnnnnnnnnnnnnnnnnnnnnnnnnnnnnnnnnnnnnnnnnnnnnnnnnnnnnnnnnnnnnnnnnnnnnnnnnnnnnnnnnnnnnnnnnnnnnnnnnnnnnnnnnnnnnnnnnnnnnnnnnnnnnnnnnnnnnnnnnnnnnnnnnnnnnnnnnnnnnnnnnnnnnnnnnnnnnnnnnnnnnnnnnnnnnnnnnnnnnnnnnnnnnnnnnnnnnnnnnnnnnnnnnnnnnnnnnnnnnnnnnnnnnnnnnnnnnnnnnnnnnnnnnnnnnnnnnnnnnnnnnnnnnnnnnnnnnnnnnnnnnnnnnnnnnnnnnnnnnnnnnnnnnnnnnnnnnnnnnnnnnnnnnnnnnnnnnnnnnnnnnnnnnnnnnnnnnnnnnnnnnnnnnnnnnnnnnnnnnnnnnnnnnnnnnnnnnnnnnnnnnnnnnnnnnnnnnnnnnnnnnnnnnnnnnnnnnnnnnnnnnnnnnnnnnnnnnnnnnnnnnnnnnnnnnnnnnnnnnnnnnnnnnnnnnnnnnnnnnnnnnnnnnnnnnnnnnnnnnnnnnnnnnnnnnnnnnnnnnnnnnnnnnnnnnnnnnnnnnnnnnnnnnnnnnnnnnnnnnnnnnnnnnnnnnnnnnnnnnnnnnnnnnnnnnnnnnnnnnnnnnnnnnnnnnnnnnnnnnnnnnnnnnnnnnnnnnnnnnnnnnnnnnnnnnnnnnnnnnnnnnnnnnnnnnnnnnnnnnnnnnnnnnnnnnnnnnnnnnnnnnnnnnnnnnnnnnnnnnnnnnnnnnnnnnnnnnnnnnnnnnnnnnnnnnnnnnnnnnnnnnnnnnnnnnnnnnnnnnnnnnnnnnnnnnnnnnnnnnnnnnnnnnnnnnnnnnnnnnnnnnnnnnnnnnnnnnnnnnnnnnnnnnnnnnnnnnnnnnnnnnnnnnnnnnnnnnnnnnnnnnnnnnnnnnnnnnnnnnnnnnnnnnnnnnnnnnnnnnnnnnnnnnnnnnnnnnnnnnnnnnnnnnnnnnnnnnnnnnnnnnnnnnnnnnnnnnnnnnnnnnnnnnnnnnnnnnnnnnnnnnnnnnnnnnnnnnnnnnnnnnnnnnnnnnnnnnnnnnnnnnnnnnnnnnnnnnnnnnnnnnnnnnnnnnnnnnnnnnnnnnnnnnnnnnnnnnnnnnnnnnnnnnnnnnnnnnnnnnnnnnnnnnnnnnnnnnnnnnnnnnnnnnnnnnnnnnnnnnnnnnnnnnnnnnnnnnnnnnnnnnnnnnnnnnnnnnnnnnnnnnnnnnnnnnnnnnnnnnnnnnnnnnnnnnnnnnnnnnnnnnnnnnnnnnnnnnnnnnnnnnnnnnnnnnnnnnnnnnnnnnnnnnnnnnnnnnnnnnnnnnnnnnnnnnnnnnnnnnnnnnnnnnnnnnnnnnnnnnnnnnnnnnnnnnnnnnnnnnnnnnnnnnnnnnnnnnnnnnnnnnnnnnnnnnnnnnnnnnnnnnnnnnnnnnnnnnnnnnnnnnnnnnnnnnnnnnnnnnnnnnnnnnnnnnnnnnnnnnnnnnnnnnnnnnnnnnnnnnnnnnnnnnnnnnnnnnnnnnnnnnnnnnnnnnnnnnnnnnnnnnnnnnnnnnnnnnnnnnnnnnnnnnnnnnnnnnnnnnnnnnnnnnnnnnnnnnnnnnnnnnnnnnnnnnnnnnnnnnnnnnnnnnnnnnnnnnnnnnnnnnnnnnnnnnnnnnnnnnnnnnnnnnnnnnnnnnnnnnnnnnnnnnnnnnnnnnnnnnnnnnnnnnnnnnnnnnnnnnnnnnnnnnnnnnnnnnnnnnnnnnnnnnnnnnnnnnnnnnnnnnnnnnnnnnnnnnnnnnnnnnnnnnnnnnnnnnnnnnnnnnnnnnnnnnnnnnnnnnnnnnnnnnnnnnnnnnnnnnnnnnnnnnnnnnnnnnnnnnnnnnnnnnnnnnnnnnnnnnnnnnnnnnnnnnnnnnnnnnnnnnnnnnnnnnnnnnnnnnnnnnnnnnnnnnnnnnnnnnnnnnnnnnnnnnnnnnnnnnnnnnnnnnnnnnnnnnnnnnnnnnnnnnnnnnnnnnnnnnnnnnnnnnnnnnnnnnnnnnnnnnnnnnnnnnnnnnnnnnnnnnnnnnnnnnnnnnnnnnnnnnnnnnnnnnnnnnnnnnnnnnnnnnnnnnnnnnnnnnnnnnnnnnnnnnnnnnnnnnnnnnnnnnnnnnnnnnnnnnnnnnnnnnnnnnnnnnnnnnnnnnnnnnnnnnnnnnnnnnnnnnnnnnnnnnnnnnnnnnnnnnnnnnnnnnnnnnnnnnnnnnnnnnnnnnnnnnnnnnnnnnnnnnnnnnnnnnnnnnnnnnnnnnnnnnnnnnnnnnnnnnnnnnnnnnnnnnnnnnnnnnnnnnnnnnnnnnnnnnnnnnnnnnnnnnnnnnnnnnnnnnnnnnnnnnnnnnnnnnnnnnnnnnnnnnnnnnnnnnnnnnnnnnnnnnnnnnnnnnnnnnnnnnnnnnnnnnnnnnnnnnnnnnnnnnnnnnnnnnnnnnnnnnnnnnnnnnnnnnnnnnnnnnnnnnnnnnnnnnnnnnnnnnnnnnnnnnnnnnnnnnnnnnnnnnnnnnnnnnnnnnnnnnnnnnnnnnnnnnnnnnnnnnnnnnnnnnnnnnnnnnnnnnnnnnnnnnnnnnnnnnnnnnnnnnnnnnnnnnnnnnnnnnnnnnnnnnnnnnnnnnnnnnnnnnnnnnnnnnnnnnnnnnnnnnnnnnnnnnnnnnnnnnnnnnnnnnnnnnnnnnnnnnnnnnnnnnnnnnnnnnnnnnnnnnnnnnnnnnnnnnnnnnnnnnnnnnnnnnnnnnnnnnnnnnnnnnnnnnnnnnnnnnnnnnnnnnnnnnnnnnnnnnnnnnnnnnnnnnnnnnnnnnnnnnnnnnnnnnnnnnnnnnnnnnnnnnnnnnnnnnnnnnnnnnnnnnnnnnnnnnnnnnnnnnnnnnnnnnnnnnnnnnnnnnnnnnnnnnnnnnnnnnnnnnnnnnnnnnnnnnnnnnnnnnnnnnnnnnnnnnnnnnnnnnnnnnnnnnnnnnnnnnnnnnnnnnnnnnnnnnnnnnnnnnnnnnnnnnnnnnnnnnnnnnnnnnnnnnnnnnnnnnnnnnnnnnnnnnnnnnnnnnnnnnnnnnnnnnnnnnnnnnnnnnnnnnnnnnnnnnnnnnnnnnnnnnnnnnnnnnnnnnnnnnnnnnnnnnnnnnnnnnnnnnnnnnnnnnnnnnnnnnnnnnnnnnnnnnnnnnnnnnnnnnnnnnnnnnnnnnnnnnnnnnnnnnnnnnnnnnnnnnnnnnnnnnnnnnnnnnnnnnnnnnnnnnnnnnnnnnnnnnnnnnnnnnnnnnnnnnnnnnnnnnnnnnnnnnnnnnnnnnnnnnnnnnnnnnnnnnnnnnnnnnnnnnnnnnnnnnnnnnnnnnnnnnnnnnnnnnnnnnnnnnnnnnnnnnnnnnnnnnnnnnnnnnnnnnnnnnnnnnnnnnnnnnnnnnnnnnnnnnnnnnnnnnnnnnnnnnnnnnnnnnnnnnnnnnnnnnnnnnnnnnnnnnnnnnnnnnnnnnnnnnnnnnnnnnnnnnnnnnnnnnnnnnnnnnnnnnnnnnnnnnnnnnnnnnnnnnnnnnnnnnnnnnnnnnnnnnnnnnnnnnnnnnnnnnnnnnnnnnnnnnnnnnnnnnnnnnnnnnnnnnnnnnnnnnnnnnnnnnnnnnnnnnnnnnnnnnnnnnnnnnnnnnnnnnnnnnnnnnnnnnnnnnnnnnnnnnnnnnnnnnnnnnnnnnnnnnnnnnnnnnnnnnnnnnnnnnnnnnnnnnnnnnnnnnnnnnnnnnnnnnnnnnnnnnnnnnnnnnnnnnnnnnnnnnnnnnnnnnnnnnnnnnnnnnnnnnnnnnnnnnnnnnnnnnnnnnnnnnnnnnnnnnnnnnnnnnnnnnnnnnnnnnnnnnnnnnnnnnnnnnnnnnnnnnnnnnnnnnnnnnnnnnnnnnnnnnnnnnnnnnnnnnnnnnnnnnnnnnnnnnnnnnnnnnnnnnnnnnnnnnnnnnnnnnnnnnnnnnnnnnnnnnnnnnnnnnnnnnnnnnnnnnnnnnnnnnnnnnnnnnnnnnnnnnnnnnnnnnnnnnnnnnnnnnnnnnnnnnnnnnnnnnnnnnnnnnnnnnnnnnnnnnnnnnnnnnnnnnnnnnnnnnnnnnnnnnnnnnnnnnnnnnnnnnnnnnnnnnnnnnnnnnnnnnnnnnnnnnnnnnnnnnnnnnnnnnnnnnnnnnnnnnnnnnnnnnnnnnnnnnnnnnnnnnnnnnnnnnnnnnnnnnnnnnnnnnnnnnnnnnnnnnnnnnnnnnnnnnnnnnnnnnnnnnnnnnnnnnnnnnnnnnnnnnnnnnnnnnnnnnnnnnnnnnnnnnnnnnnnnnnnnnnnnnnnnnnnnnnnnnnnnnnnnnnnnnnnnnnnnnnnnnnnnnnnnnnnnnnnnnnnnnnnnnnnnnnnnnnnnnnnnnnnnnnnnnnnnnnnnnnnnnnnnnnnnnnnnnnnnnnnnnnnnnnnnnnnnnnnnnnnnnnnnnnnnnnnnnnnnnnnnnnnnnnnnnnnnnnnnnnnnnnnnnnnnnnnnnnnnnnnnnnnnnnnnnnnnnnnnnnnnnnnnnnnnnnnnnnnnnnnnnnnnnnnnnnnnnnnnnnnnnnnnnnnnnnnnnnnnnnnnnnnnnnnnnnnnnnnnnnnnnnnnnnnnnnnnnnnnnnnnnnnnnnnnnnnnnnnnnnnnnnnnnnnnnnnnnnnnnnnnnnnnnnnnnnnnnnnnnnnnnnnnnnnnnnnnnnnnnnnnnnnnnnnnnnnnnnnnnnnnnnnnnnnnnnnnnnnnnnnnnnnnnnnnnnnnnnnnnnnnnnnnnnnnnnnnnnnnnnnnnnnnnnnnnnnnnnnnnnnnnnnnnnnnnnnnnnnnnnnnnnnnnnnnnnnnnnnnnnnnnnnnnnnnnnnnnnnnnnnnnnnnnnnnnnnnnnnnnnnnnnnnnnnnnnnnnnnnnnnnnnnnnnnnnnnnnnnnnnnnnnnnnnnnnnnnnnnnnnnnnnnnnnnnnnnnnnnnnnnnnnnnnnnnnnnnnnnnnnnnnnnnnnnnnnnnnnnnnnnnnnnnnnnnnnnnnnnnnnnnnnnnnnnnnnnnnnnnnnnnnnnnnnnnnnnnnnnnnnnnnnnnnnnnnnnnnnnnnnnnnnnnnnnnnnnnnnnnnnnnnnnnnnnnnnnnnnnnnnnnnnnnnnnnnnnnnnnnnnnnnnnnnnnnnnnnnnnnnnnnnnnnnnnnnnnnnnnnnnnnnnnnnnnnnnnnnnnnnnnnnnnnnnnnnnnnnnnnnnnnnnnnnnnnnnnnnnnnnnnnnnnnnnnnnnnnnnnnnnnnnnnnnnnnnnnnnnnnnnnnnnnnnnnnnnnnnnnnnnnnnnnnnnnnnnnnnnnnnnnnnnnnnnnnnnnnnnnnnnnnnnnnnnnnnnnnnnnnnnnnnnnnnnnnnnnnnnnnnnnnnnnnnnnnnnnnnnnnnnnnnnnnnnnnnnnnnnnnnnnnnnnnnnnnnnnnnnnnnnnnnnnnnnnnnnnnnnnnnnnnnnnnnnnnnnnnnnnnnnnnnnnnnnnnnnnnnnnnnnnnnnnnnnnnnnnnnnnnnnnnnnnnnnnnnnnnnnnnnnnnnnnnnnnnnnnnnnnnnnnnnnnnnnnnnnnnnnnnnnnnnnnnnnnnnnnnnnnnnnnnnnnnnnnnnnnnnnnnnnnnnnnnnnnnnnnnnnnnnnnnnnnnnnnnnnnnnnnnnnnnnnnnnnnnnnnnnnnnnnnnnnnnnnnnnnnnnnnnnnnnnnnnnnnnnnnnnnnnnnnnnnnnnnnnnnnnnnnnnnnnnnnnnnnnnnnnnnnnnnnnnnnnnnnnnnnnnnnnnnnnnnnnnnnnnnnnnnnnnnnnnnnnnnnnnnnnnnnnnnnnnnnnnnnnnnnnnnnnnnnnnnnnnnnnnnnnnnnnnnnnnnnnnnnnnnnnnnnnnnnnnnnnnnnnnnnnnnnnnnnnnnnnnnnnnnnnnnnnnnnnnnnnnnnnnnnnnnnnnnnnnnnnnnnnnnnnnnnnnnnnnnnnnnnnnnnnnnnnnnnnnnnnnnnnnnnnnnnnnnnnnnnnnnnnnnnnnnnnnnnnnnnnnnnnnnnnnnnnnnnnnnnnnnnnnnnnnnnnnnnnnnnnnnnnnnnnnnnnnnnnnnnnnnnnnnnnnnnnnnnnnnnnnnnnnnnnnnnnnnnnnnnnnnnnnnnnnnnnnnnnnnnnnnnnnnnnnnnnnnnnnnnnnnnnnnnnnnnnnnnnnnnnnnnnnnnnnnnnnnnnnnnnnnnnnnnnnnnnnnnnnnnnnnnnnnnnnnnnnnnnnnnnnnnnnnnnnnnnnnnnnnnnnnnnnnnnnnnnnnnnnnnnnnnnnnnnnnnnnnnnnnnnnnnnnnnnnnnnnnnnnnnnnnnnnnnnnnnnnnnnnnnnnnnnnnnnnnnnnnnnnnnnnnnnnnnnnnnnnnnnnnnnnnnnnnnnnnnnnnnnnnnnnnnnnnnnnnnnnnnnnnnnnnnnnnnnnnnnnnnnnnnnnnnnnnnnnnnnnnnnnnnnnnnnnnnnnnnnnnnnnnnnnnnnnnnnnnnnnnnnnnnnnnnnnnnnnnnnnnnnnnnnnnnnnnnnnnnnnnnnnnnnnnnnnnnnnnnnnnnnnnnnnnnnnnnnnnnnnnnnnnnnnnnnnnnnnnnnnnnnnnnnnnnnnnnnnnnnnnnnnnnnnnnnnnnnnnnnnnnnnnnnnnnnnnnnnnnnnnnnnnnnnnnnnnnnnnnnnnnnnnnnnnnnnnnnnnnnnnnnnnnnnnnnnnnnnnnnnnnnnnnnnnnnnnnnnnnnnnnnnnnnnnnnnnnnnnnnnnnnnnnnnnnnnnnnnnnnnnnnnnnnnnnnnnnnnnnnnnnnnnnnnnnnnnnnnnnnnnnnnnnnnnnnnnnnnnnnnnnnnnnnnnnnnnnnnnnnnnnnnnnnnnnnnnnnnnnnnnnnnnnnnnnnnnnnnnnnnnnnnnnnnnnnnnnnnnnnnnnnnnnnnnnnnnnnnnnnnnnnnnnnnnnnnnnnnnnnnnnnnnnnnnnnnnnnnnnnnnnnnnnnnnnnnnnnnnnnnnnnnnnnnnnnnnnnnnnnnnnnnnnnnnnnnnnnnnnnnnnnnnnnnnnnnnnnnnnnnnnnnnnnnnnnnnnnnnnnnnnnnnnnnnnnnnnnnnnnnnnnnnnnnnnnnnnnnnnnnnnnnnnnnnnnnnnnnnnnnnnnnnnnnnnnnnnnnnnnnnnnnnnnnnnnnnnnnnnnnnnnnnnnnnnnnnnnnnnnnnnnnnnnnnnnnnnnnnnnnnnnnnnnnnnnnnnnnnnnnnnnnnnnnnnnnnnnnnnnnnnnnnnnnnnnnnnnnnnnnnnnnnnnnnnnnnnnnnnnnnnnnnnnnnnnnnnnnnnnnnnnnnnnnnnnnnnnnnnnnnnnnnnnnnnnnnnnnnnnnnnnnnnnnnnnnnnnnnnnnnnnnnnnnnnnnnnnnnnnnnnnnnnnnnnnnnnnnnnnnnnnnnnnnnnnnnnnnnnnnnnnnnnnnnnnnnnnnnnnnnnnnnnnnnnnnnnnnnnnnnnnnnnnnnnnnnnnnnnnnnnnnnnnnnnnnnnnnnnnnnnnnnnnnnnnnnnnnnnnnnnnnnnnnnnnnnnnnnnnnnnnnnnnnnnnnnnnnnnnnnnnnnnnnnnnnnnnnnnnnnnnnnnnnnnnnnnnnnnnnnnnnnnnnnnnnnnnnnnnnnnnnnnnnnnnnnnnnnnnnnnnnnnnnnnnnnnnnnnnnnnnnnnnnnnnnnnnnnnnnnnnnnnnnnnnnnnnnnnnnnnnnnnnnnnnnnnnnnnnnnnnnnnnnnnnnnnnnnnnnnnnnnnnnnnnnnnnnnnnnnnnnnnnnnnnnnnnnnnnnnnnnnnnnnnnnnnnnnnnnnnnnnnnnnnnnnnnnnnnnnnnnnnnnnnnnnnnnnnnnnnnnnnnnnnnnnnnnnnnnnnnnnnnnnnnnnnnnnnnnnnnnnnnnnnnnnnnnnnnnnnnnnnnnnnnnnnnnnnnnnnnnnnnnnnnnnnnnnnnnnnnnnnnnnnnnnnnnnnnnnnnnnnnnnnnnnnnnnnnnnnnnnnnnnnnnnnnnnnnnnnnnnnnnnnnnnnnnnnnnnnnnnnnnnnnnnnnnnnnnnnnnnnnnnnnnnnnnnnnnnnnnnnnnnnnnnnnnnnnnnnnnnnnnnnnnnnnnnnnnnnnnnnnnnnnnnnnnnnnnnnnnnnnnnnnnnnnnnnnnnnnnnnnnnnnnnnnnnnnnnnnnnnnnnnnnnnnnnnnnnnnnnnnnnnnnnnnnnnnnnnnnnnnnnnnnnnnnnnnnnnnnnnnnnnnnnnnnnnnnnnnnnnnnnnnnnnnnnnnnnnnnnnnnnnnnnnnnnnnnnnnnnnnnnnnnnnnnnnnnnnnnnnnnnnnnnnnnnnnnnnnnnnnnnnnnnnnnnnnnnnnnnnnnnnnnnnnnnnnnnnnnnnnnnnnnnnnnnnnnnnnnnnnnnnnnnnnnnnnnnnnnnnnnnnnnnnnnnnnnnnnnnnnnnnnnnnnnnnnnnnnnnnnnnnnnnnnnnnnnnnnnnnnnnnnnnnnnnnnnnnnnnnnnnnnnnnnnnnnnnnnnnnnnnnnnnnnnnnnnnnnnnnnnnnnnnnnnnnnnnnnnnnnnnnnnnnnnnnnnnnnnnnnnnnnnnnnnnnnnnnnnnnnnnnnnnnnnnnnnnnnnnnnnnnnnnnnnnnnnnnnnnnnnnnnnnnnnnnnnnnnnnnnnnnnnnnnnnnnnnnnnnnnnnnnnnnnnnnnnnnnnnnnnnnnnnnnnnnnnnnnnnnnnnnnnnnnnnnnnnnnnnnnnnnnnnnnnnnnnnnnnnnnnnnnnnnnnnnnnnnnnnnnnnnnnnnnnnnnnnnnnnnnnnnnnnnnnnnnnnnnnnnnnnnnnnnnnnnnnnnnnnnnnnnnnnnnnnnnnnnnnnnnnnnnnnnnnnnnnnnnnnnnnnnnnnnnnnnnnnnnnnnnnnnnnnnnnnnnnnnnnnnnnnnnnnnnnnnnnnnnnnnnnnnnnnnnnnnnnnnnnnnnnnnnnnnnnnnnnnnnnnnnnnnnnnnnnnnnnnnnnnnnnnnnnnnnnnnnnnnnnnnnnnnnnnnnnnnnnnnnnnnnnnnnnnnnnnnnnnnnnnnnnnnnnnnnnnnnnnnnnnnnnnnnnnnnnnnnnnnnnnnnnnnnnnnnnnnnnnnnnnnnnnnnnnnnnnnnnnnnnnnnnnnnnnnnnnnnnnnnnnnnnnnnnnnnnnnnnnnnnnnnnnnnnnnnnnnnnnnnnnnnnnnnnnnnnnnnnnnnnnnnnnnnnnnnnnnnnnnnnnnnnnnnnnnnnnnnnnnnnnnnnnnnnnnnnnnnnnnnnnnnnnnnnnnnnnnnnnnnnnnnnnnnnnnnnnnnnnnnnnnnnnnnnnnnnnnnnnnnnnnnnnnnnnnnnnnnnnnnnnnnnnnnnnnnnnnnnnnnnnnnnnnnnnnnnnnnnnnnnnnnnnnnnnnnnnnnnnnnnnnnnnnnnnnnnnnnnnnnnnnnnnnnnnnnnnnnnnnnnnnnnnnnnnnnnnnnnnnnnnnnnnnnnnnnnnnnnnnnnnnnnnnnnnnnnnnnnnnnnnnnnnnnnnnnnnnnnnnnnnnnnnnnnnnnnnnnnnnnnnnnnnnnnnnnnnnnnnnnnnnnnnnnnnnnnnnnnnnnnnnnnnnnnnnnnnnnnnnnnnnnnnnnnnnnnnnnnnnnnnnnnnnnnnnnnnnnnnnnnnnnnnnnnnnnnnnnnnnnnnnnnnnnnnnnnnnnnnnnnnnnnnnnnnnnnnnnnnnnnnnnnnnnnnnnnnnnnnnnnnnnnnnnnnnnnnnnnnnnnnnnnnnnnnnnnnnnnnnnnnnnnnnnnnnnnnnnnnnnnnnnnnnnnnnnnnnnnnnnnnnnnnnnnnnnnnnnnnnnnnnnnnnnnnnnnnnnnnnnnnnnnnnnnnnnnnnnnnnnnnnnnnnnnnnnnnnnnnnnnnnnnnnnnnnnnnnnnnnnnnnnnnnnnnnnnnnnnnnnnnnnnnnnnnnnnnnnnnnnnnnnnnnnnnnnnnnnnnnnnnnnnnnnnnnnnnnnnnnnnnnnnnnnnnnnnnnnnnnnnnnnnnnnnnnnnnnnnnnnnnnnnnnnnnnnnnnnnnnnnnnnnnnnnnnnnnnnnnnnnnnnnnnnnnnnnnnnnnnnnnnnnnnnnnnnnnnnnnnnnnnnnnnnnnnnnnnnnnnnnnnnnnnnnnnnnnnnnnnnnnnnnnnnnnnnnnnnnnnnnnnnnnnnnnnnnnnnnnnnnnnnnnnnnnnnnnnnnnnnnnnnnnnnnnnnnnnnnnnnnnnnnnnnnnnnnnnnnnnnnnnnnnnnnnnnnnnnnnnnnnnnnnnnnnnnnnnnnnnnnnnnnnnnnnnnnnnnnnnnnnnnnnnnnnnnnnnnnnnnnnnnnnnnnnnnnnnnnnnnnnnnnnnnnnnnnnnnnnnnnnnnnnnnnnnnnnnnnnnnnnnnnnnnnnnnnnnnnnnnnnnnnnnnnnnnnnnnnnnnnnnnnnnnnnnnnnnnnnnnnnnnnnnnnnnnnnnnnnnnnnnnnnnnnnnnnnnnnnnnnnnnnnnnnnnnnnnnnnnnnnnnnnnnnnnnnnnnnnnnnnnnnnnnnnnnnnnnnnnnnnnnnnnnnnnnnnnnnnnnnnnnnnnnnnnnnnnnnnnnnnnnnnnnnnnnnnnnnnnnnnnnnnnnnnnnnnnnnnnnnnnnnnnnnnnnnnnnnnnnnnnnnnnnnnnnnnnnnnnnnnnnnnnnnnnnnnnnnnnnnnnnnnnnnnnnnnnnnnnnnnnnnnnnnnnnnnnnnnnnnnnnnnnnnnnnnnnnnnnnnnnnnnnnnnnnnnnnnnnnnnnnnnnnnnnnnnnnnnnnnnnnnnnnnnnnnnnnnnnnnnnnnnnnnnnnnnnnnnnnnnnnnnnnnnnnnnnnnnnnnnnnnnnnnnnnnnnnnnnnnnnnnnnnnnnnnnnnnnnnnnnnnnnnnnnnnnnnnnnnnnnnnnnnnnnnnnnnnnnnnnnnnnnnnnnnnnnnnnnnnnnnnnnnnnnnnnnnnnnnnnnnnnnnnnnnnnnnnnnnnnnnnnnnnnnnnnnnnnnnnnnnnnnnnnnnnnnnnnnnnnnnnnnnnnnnnnnnnnnnnnnnnnnnnnnnnnnnnnnnnnnnnnnnnnnnnnnnnnnnnnnnnnnnnnnnnnnnnnnnnnnnnnnnnnnnnnnnnnnnnnnnnnnnnnnnnnnnnnnnnnnnnnnnnnnnnnnnnnnnnnnnnnnnnnnnnnnnnnnnnnnnnnnnnnnnnnnnnnnnnnnnnnnnnnnnnnnnnnnnnnnnnnnnnnnnnnnnnnnnnnnnnnnnnnnnnnnnnnnnnnnnnnnnnnnnnnnnnnnnnnnnnnnnnnnnnnnnnnnnnnnnnnnnnnnnnnnnnnnnnnnnnnnnnnnnnnnnnnnnnnnnnnnnnnnnnnnnnnnnnnnnnnnnnnnnnnnnnnnnnnnnnnnnnnnnnnnnnnnnnnnnnnnnnnnnnnnnnnnnnnnnnnnnnnnnnnnnnnnnnnnnnnnnnnnnnnnnnnnnnnnnnnnnnnnnnnnnnnnnnnnnnnnnnnnnnnnnnnnnnnnnnnnnnnnnnnnnnnnnnnnnnnnnnnnnnnnnnnnnnnnnnnnnnnnnnnnnnnnnnnnnnnnnnnnnnnnnnnnnnnnnnnnnnnnnnnnnnnnnnnnnnnnnnnnnnnnnnnnnnnnnnnnnnnnnnnnnnnnnnnnnnnnnnnnnnnnnnnnnnnnnnnnnnnnnnnnnnnnnnnnnnnnnnnnnnnnnnnnnnnnnnnnnnnnnnnnnnnnnnnnnnnnnnnnnnnnnnnnnnnnnnnnnnnnnnnnnnnnnnnnnnnnnnnnnnnnnnnnnnnnnnnnnnnnnnnnnnnnnnnnnnnnnnnnnnnnnnnnnnnnnnnnnnnnnnnnnnnnnnnnnnnnnnnnnnnnnnnnnnnnnnnnnnnnnnnnnnnnnnnnnnnnnnnnnnnnnnnnnnnnnnnnnnnnnnnnnnnnnnnnnnnnnnnnnnnnnnnnnnnnnnnnnnnnnnnnnnnnnnnnnnnnnnnnnnnnnnnnnnnnnnnnnnnnnnnnnnnnnnnnnnnnnnnnnnnnnnnnnnnnnnnnnnnnnnnnnnnnnnnnnnnnnnnnnnnnnnnnnnnnnnnnnnnnnnnnnnnnnnnnnnnnnnnnnnnnnnnnnnnnnnnnnnnnnnnnnnnnnnnnnnnnnnnnnnnnnnnnnnnnnnnnnnnnnnnnnnnnnnnnnnnnnnnnnnnnnnnnnnnnnnnnnnnnnnnnnnnnnnnnnnnnnnnnnnnnnnnnnnnnnnnnnnnnnnnnnnnnnnnnnnnnnnnnnnnnnnnnnnnnnnnnnnnnnnnnnnnnnnnnnnnnnnnnnnnnnnnnnnnnnnnnnnnnnnnnnnnnnnnnnnnnnnnnnnnnnnnnnnnnnnnnnnnnnnnnnnnnnnnnnnnnnnnnnnnnnnnnnnnnnnnnnnnnnnnnnnnnnnnnnnnnnnnnnnnnnnnnnnnnnnnnnnnnnnnnnnnnnnnnnnnnnnnnnnnnnnnnnnnnnnnnnnnnnnnnnnnnnnnnnnnnnnnnnnnnnnnnnnnnnnnnnnnnnnnnnnnnnnnnnnnnnnnnnnnnnnnnnnnnnnnnnnnnnnnnnnnnnnnnnnnnnnnnnnnnnnnnnnnnnnnnnnnnnnnnnnnnnnnnnnnnnnnnnnnnnnnnnnnnnnnnnnnnnnnnnnnnnnnnnnnnnnnnnnnnnnnnnnnnnnnnnnnnnnnnnnnnnnnnnnnnnnnnnnnnnnnnnnnnnnnnnnnnnnnnnnnnnnnnnnnnnnnnnnnnnnnnnnnnnnnnnnnnnnnnnnnnnnnnnnnnnnnnnnnnnnnnnnnnnnnnnnnnnnnnnnnnnnnnnnnnnnnnnnnnnnnnnnnnnnnnnnnnnnnnnnnnnnnnnnnnnnnnnnnnnnnnnnnnnnnnnnnnnnnnnnnnnnnnnnnnnnnnnnnnnnnnnnnnnnnnnnnnnnnnnnnnnnnnnnnnnnnnnnnnnnnnnnnnnnnnnnnnnnnnnnnnnnnnnnnnnnnnnnnnnnnnnnnnnnnnnnnnnnnnnnnnnnnnnnnnnnnnnnnnnnnnnnnnnnnnnnnnnnnnnnnnnnnnnnnnnnnnnnnnnnnnnnnnnnnnnnnnnnnnnnnnnnnnnnnnnnnnnnnnnnnnnnnnnnnnnnnnnnnnnnnnnnnnnnnnnnnnnnnnnnnnnnnnnnnnnnnnnnnnnnnnnnnnnnnnnnnnnnnnnnnnnnnnnnnnnnnnnnnnnnnnnnnnnnnnnnnnnnnnnnnnnnnnnnnnnnnnnnnnnnnnnnnnnnnnnnnnnnnnnnnnnnnnnnnnnnnnnnnnnnnnnnnnnnnnnnnnnnnnnnnnnnnnnnnnnnnnnnnnnnnnnnnnnnnnnnnnnnnnnnnnnnnnnnnnnnnnnnnnnnnnnnnnnnnnnnnnnnnnnnnnnnnnnnnnnnnnnnnnnnnnnnnnnnnnnnnnnnnnnnnnnnnnnnnnnnnnnnnnnnnnnnnnnnnnnnnnnnnnnnnnnnnnnnnnnnnnnnnnnnnnnnnnnnnnnnnnnnnnnnnnnnnnnnnnnnnnnnnnnnnnnnnnnnnnnnnnnnnnnnnnnnnnnnnnnnnnnnnnnnnnnnnnnnnnnnnnnnnnnnnnnnnnnnnnnnnnnnnnnnnnnnnnnnnnnnnnnnnnnnnnnnnnnnnnnnnnnnnnnnnnnnnnnnnnnnnnnnnnnnnnnnnnnnnnnnnnnnnnnnnnnnnnnnnnnnnnnnnnnnnnnnnnnnnnnnnnnnnnnnnnnnnnnnnnnnnnnnnnnnnnnnnnnnnnnnnnnnnnnnnnnnnnnnnnnnnnnnnnnnnnnnnnnnnnnnnnnnnnnnnnnnnnnnnnnnnnnnnnnnnnnnnnnnnnnnnnnnnnnnnnnnnnnnnnnnnnnnnnnnnnnnnnnnnnnnnnnnnnnnnnnnnnnnnnnnnnnnnnnnnnnnnnnnnnnnnnnnnnnnnnnnnnnnnnnnnnnnnnnnnnnnnnnnnnnnnnnnnnnnnnnnnnnnnnnnnnnnnnnnnnnnnnnnnnnnnnnnnnnnnnnnnnnnnnnnnnnnnnnnnnnnnnnnnnnnnnnnnnnnnnnnnnnnnnnnnnnnnnnnnnnnnnnnnnnnnnnnnnnnnnnnnnnnnnnnnnnnnnnnnnnnnnnnnnnnnnnnnnnnnnnnnnnnnnnnnnnnnnnnnnnnnnnnnnnnnnnnnnnnnnnnnnnnnnnnnnnnnnnnnnnnnnnnnnnnnnnnnnnnnnnnnnnnnnnnnnnnnnnnnnnnnnnnnnnnnnnnnnnnnnnnnnnnnnnnnnnnnnnnnnnnnnnnnnnnnnnnnnnnnnnnnnnnnnnnnnnnnnnnnnnnnnnnnnnnnnnnnnnnnnnnnnnnnnnnnnnnnnnnnnnnnnnnnnnnnnnnnnnnnnnnnnnnnnnnnnnnnnnnnnnnnnnnnnnnnnnnnnnnnnnnnnnnnnnnnnnnnnnnnnnnnnnnnnnnnnnnnnnnnnnnnnnnnnnnnnnnnnnnnnnnnnnnnnnnnnnnnnnnnnnnnnnnnnnnnnnnnnnnnnnnnnnnnnnnnnnnnnnnnnnnnnnnnnnnnnnnnnnnnnnnnnnnnnnnnnnnnnnnnnnnnnnnnnnnnnnnnnnnnnnnnnnnnnnnnnnnnnnnnnnnnnnnnnnnnnnnnnnnnnnnnnnnnnnnnnnnnnnnnnnnnnnnnnnnnnnnnnnnnnnnnnnnnnnnnnnnnnnnnnnnnnnnnnnnnnnnnnnnnnnnnnnnnnnnnnnnnnnnnnnnnnnnnnnnnnnnnnnnnnnnnnnnnnnnnnnnnnnnnnnnnnnnnnnnnnnnnnnnnnnnnnnnnnnnnnnnnnnnnnnnnnnnnnnnnnnnnnnnnnnnnnnnnnnnnnnnnnnnnnnnnnnnnnnnnnnnnnnnnnnnnnnnnnnnnnnnnnnnnnnnnnnnnnnnnnnnnnnnnnnnnnnnnnnnnnnnnnnnnnnnnnnnnnnnnnnnnnnnnnnnnnnnnnnnnnnnnnnnnnnnnnnnnnnnnnnnnnnnnnnnnnnnnnnnnnnnnnnnnnnnnnnnnnnnnnnnnnnnnnnnnnnnnnnnnnnnnnnnnnnnnnnnnnnnnnnnnnnnnnnnnnnnnnnnnnnnnnnnnnnnnnnnnnnnnnnnnnnnnnnnnnnnnnnnnnnnnnnnnnnnnnnnnnnnnnnnnnnnnnnnnnnnnnnnnnnnnnnnnnnnnnnnnnnnnnnnnnnnnnnnnnnnnnnnnnnnnnnnnnnnnnnnnnnnnnnnnnnnnnnnnnnnnnnnnnnnnnnnnnnnnnnnnnnnnnnnnnnnnnnnnnnnnnnnnnnnnnnnnnnnnnnnnnnnnnnnnnnnnnnnnnnnnnnnnnnnnnnnnnnnnnnnnnnnnnnnnnnnnnnnnnnnnnnnnnnnnnnnnnnnnnnnnnnnnnnnnnnnnnnnnnnnnnnnnnnnnnnnnnnnnnnnnnnnnnnnnnnnnnnnnnnnnnnnnnnnnnnnnnnnnnnnnnnnnnnnnnnnnnnnnnnnnnnnnnnnnnnnnnnnnnnnnnnnnnnnnnnnnnnnnnnnnnnnnnnnnnnnnnnnnnnnnnnnnnnnnnnnnnnnnnnnnnnnnnnnnnnnnnnnnnnnnnnnnnnnnnnnnnnnnnnnnnnnnnnnnnnnnnnnnnnnnnnnnnnnnnnnnnnnnnnnnnnnnnnnnnnnnnnnnnnnnnnnnnnnnnnnnnnnnnnnnnnnnnnnnnnnnnnnnnnnnnnnnnnnnnnnnnnnnnnnnnnnnnnnnnnnnnnnnnnnnnnnnnnnnnnnnnnnnnnnnnnnnnnnnnnnnnnnnnnnnnnnnnnnnnnnnnnnnnnnnnnnnnnnnnnnnnnnnnnnnnnnnnnnnnnnnnnnnnnnnnnnnnnnnnnnnnnnnnnnnnnnnnnnnnnnnnnnnnnnnnnnnnnnnnnnnnnnnnnnnnnnnnnnnnnnnnnnnnnnnnnnnnnnnnnnnnnnnnnnnnnnnnnnnnnnnnnnnnnnnnnnnnnnnnnnnnnnnnnnnnnnnnnnnnnnnnnnnnnnnnnnnnnnnnnnnnnnnnnnnnnnnnnnnnnnnnnnnnnnnnnnnnnnnnnnnnnnnnnnnnnnnnnnnnnnnnnnnnnnnnnnnnnnnnnnnnnnnnnnnnnnnnnnnnnnnnnnnnnnnnnnnnnnnnnnnnnnnnnnnnnnnnnnnnnnnnnnnnnnnnnnnnnnnnnnnnnnnnnnnnnnnnnnnnnnnnnnnnnnnnnnnnnnnnnnnnnnnnnnnnnnnnnnnnnnnnnnnnnnnnnnnnnnnnnnnnnnnnnnnnnnnnnnnnnnnnnnnnnnnnnnnnnnnnnnnnnnnnnnnnnnnnnnnnnnnnnnnnnnnnnnnnnnnnnnnnnnnnnnnnnnnnnnnnnnnnnnnnnnnnnnnnnnnnnnnnnnnnnnnnnnnnnnnnnnnnnnnnnnnnnnnnnnnnnnnnnnnnnnnnnnnnnnnnnnnnnnnnnnnnnnnnnnnnnnnnnnnnnnnnnnnnnnnnnnnnnnnnnnnnnnnnnnnnnnnnnnnnnnnnnnnnnnnnnnnnnnnnnnnnnnnnnnnnnnnnnnnnnnnnnnnnnnnnnnnnnnnnnnnnnnnnnnnnnnnnnnnnnnnnnnnnnnnnnnnnnnnnnnnnnnnnnnnnnnnnnnnnnnnnnnnnnnnnnnnnnnnnnnnnnnnnnnnnnnnnnnnnnnnnnnnnnnnnnnnnnnnnnnnnnnnnnnnnnnnnnnnnnnnnnnnnnnnnnnnnnnnnnnnnnnnnnnnnnnnnnnnnnnnnnnnnnnnnnnnnnnnnnnnnnnnnnnnnnnnnnnnnnnnnnnnnnnnnnnnnnnnnnnnnnnnnnnnnnnnnnnnnnnnnnnnnnnnnnnnnnnnnnnnnnnnnnnnnnnnnnnnnnnnnnnnnnnnnnnnnnnnnnnnnnnnnnnnnnnnnnnnnnnnnnnnnnnnnnnnnnnnnnnnnnnnnnnnnnnnnnnnnnnnnnnnnnnnnnnnnnnnnnnnnnnnnnnnnnnnnnnnnnnnnnnnnnnnnnnnnnnnnnnnnnnnnnnnnnnnnnnnnnnnnnnnnnnnnnnnnnnnnnnnnnnnnnnnnnnnnnnnnnnnnnnnnnnnnnnnnnnnnnnnnnnnnnnnnnnnnnnnnnnnnnnnnnnnnnnnnnnnnnnnnnnnnnnnnnnnnnnnnnnnnnnnnnnnnnnnnnnnnnnnnnnnnnnnnnnnnnnnnnnnnnnnnnnnnnnnnnnnnnnnnnnnnnnnnnnnnnnnnnnnnnnnnnnnnnnnnnnnnnnnnnnnnnnnnnnnnnnnnnnnnnnnnnnnnnnnnnnnnnnnnnnnnnnnnnnnnnnnnnnnnnnnnnnnnnnnnnnnnnnnnnnnnnnnnnnnnnnnnnnnnnnnnnnnnnnnnnnnnnnnnnnnnnnnnnnnnnnnnnnnnnnnnnnnnnnnnnnnnnnnnnnnnnnnnnnnnnnnnnnnnnnnnnnnnnnnnnnnnnnnnnnnnnnnnnnnnnnnnnnnnnnnnnnnnnnnnnnnnnnnnnnnnnnnnnnnnnnnnnnnnnnnnnnnnnnnnnnnnnnnnnnnnnnnnnnnnnnnnnnnnnnnnnnnnnnnnnnnnnnnnnnnnnnnnnnnnnnnnnnnnnnnnnnnnnnnnnnnnnnnnnnnnnnnnnnnnnnnnnnnnnnnnnnnnnnnnnnnnnnnnnnnnnnnnnnnnnnnnnnnnnnnnnnnnnnnnnnnnnnnnnnnnnnnnnnnnnnnnnnnnnnnnnnnnnnnnnnnnnnnnnnnnnnnnnnnnnnnnnnnnnnnnnnnnnnnnnnnnnnnnnnnnnnnnnnnnnnnnnnnnnnnnnnnnnnnnnnnnnnnnnnnnnnnnnnnnnnnnnnnnnnnnnnnnnnnnnnnnnnnnnnnnnnnnnnnnnnnnnnnnnnnnnnnnnnnnnnnnnnnnnnnnnnnnnnnnnnnnnnnnnnnnnnnnnnnnnnnnnnnnnnnnnnnnnnnnnnnnnnnnnnnnnnnnnnnnnnnnnnnnnnnnnnnnnnnnnnnnnnnnnnnnnnnnnnnnnnnnnnnnnnnnnnnnnnnnnnnnnnnnnnnnnnnnnnnnnnnnnnnnnnnnnnnnnnnnnnnnnnnnnnnnnnnnnnnnnnnnnnnnnnnnnnnnnnnnnnnnnnnnnnnnnnnnnnnnnnnnnnnnnnnnnnnnnnnnnnnnnnnnnnnnnnnnnnnnnnnnnnnnnnnnnnnnnnnnnnnnnnnnnnnnnnnnnnnnnnnnnnnnnnnnnnnnnnnnnnnnnnnnnnnnnnnnnnnnnnnnnnnnnnnnnnnnnnnnnnnnnnnnnnnnnnnnnnnnnnnnnnnnnnnnnnnnnnnnnnnnnnnnnnnnnnnnnnnnnnnnnnnnnnnnnnnnnnnnnnnnnnnnnnnnnnnnnnnnnnnnnnnnnnnnnnnnnnnnnnnnnnnnnnnnnnnnnnnnnnnnnnnnnnnnnnnnnnnnnnnnnnnnnnnnnnnnnnnnnnnnnnnnnnnnnnnnnnnnnnnnnnnnnnnnnnnnnnnnnnnnnnnnnnnnnnnnnnnnnnnnnnnnnnnnnnnnnnnnnnnnnnnnnnnnnnnnnnnnnnnnnnnnnnnnnnnnnnnnnnnnnnnnnnnnnnnnnnnnnnnnnnnnnnnnnnnnnnnnnnnnnnnnnnnnnnnnnnnnnnnnnnnnnnnnnnnnnnnnnnnnnnnnnnnnnnnnnnnnnnnnnnnnnnnnnnnnnnnnnnnnnnnnnnnnnnnnnnnnnnnnnnnnnnnnnnnnnnnnnnnnnnnnnnnnnnnnnnnnnnnnnnnnnnnnnnnnnnnnnnnnnnnnnnnnnnnnnnnnnnnnnnnnnnnnnnnnnnnnnnnnnnnnnnnnnnnnnnnnnnnnnnnnnnnnnnnnnnnnnnnnnnnnnnnnnnnnnnnnnnnnnnnnnnnnnnnnnnnnnnnnnnnnnnnnnnnnnnnnnnnnnnnnnnnnnnnnnnnnnnnnnnnnnnnnnnnnnnnnnnnnnnnnnnnnnnnnnnnnnnnnnnnnnnnnnnnnnnnnnnnnnnnnnnnnnnnnnnnnnnnnnnnnnnnnnnnnnnnnnnnnnnnnnnnnnnnnnnnnnnnnnnnnnnnnnnnnnnnnnnnnnnnnnnnnnnnnnnnnnnnnnnnnnnnnnnnnnnnnnnnnnnnnnnnnnnnnnnnnnnnnnnnnnnnnnnnnnnnnnnnnnnnnnnnnnnnnnnnnnnnnnnnnnnnnnnnnnnnnnnnnnnnnnnnnnnnnnnnnnnnnnnnnnnnnnnnnnnnnnnnnnnnnnnnnnnnnnnnnnnnnnnnnnnnnnnnnnnnnnnnnnnnnnnnnnnnnnnnnnnnnnnnnnnnnnnnnnnnnnnnnnnnnnnnnnnnnnnnnnnnnnnnnnnnnnnnnnnnnnnnnnnnnnnnnnnnnnnnnnnnnnnnnnnnnnnnnnnnnnnnnnnnnnnnnnnnnnnnnnnnnnnnnnnnnnnnnnnnnnnnnnnnnnnnnnnnnnnnnnnnnnnnnnnnnnnnnnnnnnnnnnnnnnnnnnnnnnnnnnnnnnnnnnnnnnnnnnnnnnnnnnnnnnnnnnnnnnnnnnnnnnnnnnnnnnnnnnnnnnnnnnnnnnnnnnnnnnnnnnnnnnnnnnnnnnnnnnnnnnnnnnnnnnnnnnnnnnnnnnnnnnnnnnnnnnnnnnnnnnnnnnnnnnnnnnnnnnnnnnnnnnnnnnnnnnnnnnnnnnnnnnnnnnnnnnnnnnnnnnnnnnnnnnnnnnnnnnnnnnnnnnnnnnnnnnnnnnnnnnnnnnnnnnnnnnnnnnnnnnnnnnnnnnnnnnnnnnnnnnnnnnnnnnnnnnnnnnnnnnnnnnnnnnnnnnnnnnnnnnnnnnnnnnnnnnnnnnnnnnnnnnnnnnnnnnnnnnnnnnnnnnnnnnnnnnnnnnnnnnnnnnnnnnnnnnnnnnnnnnnnnnnnnnnnnnnnnnnnnnnnnnnnnnnnnnnnnnnnnnnnnnnnnnnnnnnnnnnnnnnnnnnnnnnnnnnnnnnnnnnnnnnnnnnnnnnnnnnnnnnnnnnnnnnnnnnnnnnnnnnnnnnnnnnnnnnnnnnnnnnnnnnnnnnnnnnnnnnnnnnnnnnnnnnnnnnnnnnnnnnnnnnnnnnnnnnnnnnnnnnnnnnnnnnnnnnnnnnnnnnnnnnnnnnnnnnnnnnnnnnnnnnnnnnnnnnnnnnnnnnnnnnnnnnnnnnnnnnnnnnnnnnnnnnnnnnnnnnnnnnnnnnnnnnnnnnnnnnnnnnnnnnnnnnnnnnnnnnnnnnnnnnnnnnnnnnnnnnnnnnnnnnnnnnnnnnnnnnnnnnnnnnnnnnnnnnnnnnnnnnnnnnnnnnnnnnnnnnnnnnnnnnnnnnnnnnnnnnnnnnnnnnnnnnnnnnnnnnnnnnnnnnnnnnnnnnnnnnnnnnnnnnnnnnnnnnnnnnnnnnnnnnnnnnnnnnnnnnnnnnnnnnnnnnnnnnnnnnnnnnnnnnnnnnnnnnnnnnnnnnnnnnnnnnnnnnnnnnnnnnnnnnnnnnnnnnnnnnnnnnnnnnnnnnnnnnnnnnnnnnnnnnnnnnnnnnnnnnnnnnnnnnnnnnnnnnnnnnnnnnnnnnnnnnnnnnnnnnnnnnnnnnnnnnnnnnnnnnnnnnnnnnnnnnnnnnnnnnnnnnnnnnnnnnnnnnnnnnnnnnnnnnnnnnnnnnnnnnnnnnnnnnnnnnnnnnnnnnnnnnnnnnnnnnnnnnnnnnnnnnnnnnnnnnnnnnnnnnnnnnnnnnnnnnnnnnnnnnnnnnnnnnnnnnnnnnnnnnnnnnnnnnnnnnnnnnnnnnnnnnnnnnnnnnnnnnnnnnnnnnnnnnnnnnnnnnnnnnnnnnnnnnnnnnnnnnnnnnnnnnnnnnnnnnnnnnnnnnnnnnnnnnnnnnnnnnnnnnnnnnnnnnnnnnnnnnnnnnnnnnnnnnnnnnnnnnnnnnnnnnnnnnnnnnnnnnnnnnnnnnnnnnnnnnnnnnnnnnnnnnnnnnnnnnnnnnnnnnnnnnnnnnnnnnnnnnnnnnnnnnnnnnnnnnnnnnnnnnnnnnnnnnnnnnnnnnnnnnnnnnnnnnnnnnnnnnnnnnnnnnnnnnnnnnnnnnnnnnnnnnnnnnnnnnnnnnnnnnnnnnnnnnnnnnnnnnnnnnnnnnnnnnnnnnnnnnnnnnnnnnnnnnnnnnnnnnnnnnnnnnnnnnnnnnnnnnnnnnnnnnnnnnnnnnnnnnnnnnnnnnnnnnnnnnnnnnnnnnnnnnnnnnnnnnnnnnnnnnnnnnnnnnnnnnnnnnnnnnnnnnnnnnnnnnnnnnnnnnnnnnnnnnnnnnnnnnnnnnnnnnnnnnnnnnnnnnnnnnnnnnnnnnnnnnnnnnnnnnnnnnnnnnnnnnnnnnnnnnnnnnnnnnnnnnnnnnnnnnnnnnnnnnnnnnnnnnnnnnnnnnnnnnnnnnnnnnnnnnnnnnnnnnnnnnnnnnnnnnnnnnnnnnnnnnnnnnnnnnnnnnnnnnnnnnnnnnnnnnnnnnnnnnnnnnnnnnnnnnnnnnnnnnnnnnnnnnnnnnnnnnnnnnnnnnnnnnnnnnnnnnnnnnnnnnnnnnnnnnnnnnnnnnnnnnnnnnnnnnnnnnnnnnnnnnnnnnnnnnnnnnnnnnnnnnnnnnnnnnnnnnnnnnnnnnnnnnnnnnnnnnnnnnnnnnnnnnnnnnnnnnnnnnnnnnnnnnnnnnnnnnnnnnnnnnnnnnnnnnnnnnnnnnnnnnnnnnnnnnnnnnnnnnnnnnnnnnnnnnnnnnnnnnnnnnnnnnnnnnnnnnnnnnnnnnnnnnnnnnnnnnnnnnnnnnnnnnnnnnnnnnnnnnnnnnnnnnnnnnnnnnnnnnnnnnnnnnnnnnnnnnnnnnnnnnnnnnnnnnnnnnnnnnnnnnnnnnnnnnnnnnnnnnnnnnnnnnnnnnnnnnnnnnnnnnnnnnnnnnnnnnnnnnnnnnnnnnnnnnnnnnnnnnnnnnnnnnnnnnnnnnnnnnnnnnnnnnnnnnnnnnnnnnnnnnnnnnnnnnnnnnnnnnnnnnnnnnnnnnnnnnnnnnnnnnnnnnnnnnnnnnnnnnnnnnnnnnnnnnnnnnnnnnnnnnnnnnnnnnnnnnnnnnnnnnnnnnnnnnnnnnnnnnnnnnnnnnnnnnnnnnnnnnnnnnnnnnnnnnnnnnnnnnnnnnnnnnnnnnnnnnnnnnnnnnnnnnnnnnnnnnnnnnnnnnnnnnnnnnnnnnnnnnnnnnnnnnnnnnnnnnnnnnnnnnnnnnnnnnnnnnnnnnnnnnnnnnnnnnnnnnnnnnnnnnnnnnnnnnnnnnnnnnnnnnnnnnnnnnnnnnnnnnnnnnnnnnnnnnnnnnnnnnnnnnnnnnnnnnnnnnnnnnnnnnnnnnnnnnnnnnnnnnnnnnnnnnnnnnnnnnnnnnnnnnnnnnnnnnnnnnnnnnnnnnnnnnnnnnnnnnnnnnnnnnnnnnnnnnnnnnnnnnnnnnnnnnnnnnnnnnnnnnnnnnnnnnnnnnnnnnnnnnnnnnnnnnnnnnnnnnnnnnnnnnnnnnnnnnnnnnnnnnnnnnnnnnnnnnnnnnnnnnnnnnnnnnnnnnnnnnnnnnnnnnnnnnnnnnnnnnnnnnnnnnnnnnnnnnnnnnnnnnnnnnnnnnnnnnnnnnnnnnnnnnnnnnnnnnnnnnnnnnnnnnnnnnnnnnnnnnnnnnnnnnnnnnnnnnnnnnnnnnnnnnnnnnnnnnnnnnnnnnnnnnnnnnnnnnnnnnnnnnnnnnnnnnnnnnnnnnnnnnnnnnnnnnnnnnnnnnnnnnnnnnnnnnnnnnnnnnnnnnnnnnnnnnnnnnnnnnnnnnnnnnnnnnnnnnnnnnnnnnnnnnnnnnnnnnnnnnnnnnnnnnnnnnnnnnnnnnnnnnnnnnnnnnnnnnnnnnnnnnnnnnnnnnnnnnnnnnnnnnnnnnnnnnnnnnnnnnnnnnnnnnnnnnnnnnnnnnnnnnnnnnnnnnnnnnnnnnnnnnnnnnnnnnnnnnnnnnnnnnnnnnnnnnnnnnnnnnnnnnnnnnnnnnnnnnnnnnnnnnnnnnnnnnnnnnnnnnnnnnnnnnnnnnnnnnnnnnnnnnnnnnnnnnnnnnnnnnnnnnnnnnnnnnnnnnnnnnnnnnnnnnnnnnnnnnnnnnnnnnnnnnnnnnnnnnnnnnnnnnnnnnnnnnnnnnnnnnnnnnnnnnnnnnnnnnnnnnnnnnnnnnnnnnnnnnnnnnnnnnnnnnnnnnnnnnnnnnnnnnnnnnnnnnnnnnnnnnnnnnnnnnnnnnnnnnnnnnnnnnnnnnnnnnnnnnnnnnnnnnnnnnnnnnnnnnnnnnnnnnnnnnnnnnnnnnnnnnnnnnnnnnnnnnnnnnnnnnnnnnnnnnnnnnnnnnnnnnnnnnnnnnnnnnnnnnnnnnnnnnnnnnnnnnnnnnnnnnnnnnnnnnnnnnnnnnnnnnnnnnnnnnnnnnnnnnnnnnnnnnnnnnnnnnnnnnnnnnnnnnnnnnnnnnnnnnnnnnnnnnnnnnnnnnnnnnnnnnnnnnnnnnnnnnnnnnnnnnnnnnnnnnnnnnnnnnnnnnnnnnnnnnnnnnnnnnnnnnnnnnnnnnnnnnnnnnnnnnnnnnnnnnnnnnnnnnnnnnnnnnnnnnnnnnnnnnnnnnnnnnnnnnnnnnnnnnnnnnnnnnnnnnnnnnnnnnnnnnnnnnnnnnnnnnnnnnnnnnnnnnnnnnnnnnnnnnnnnnnnnnnnnnnnnnnnnnnnnnnnnnnnnnnnnnnnnnnnnnnnnnnnnnnnnnnnnnnnnnnnnnnnnnnnnnnnnnnnnnnnnnnnnnnnnnnnnnnnnnnnnnnnnnnnnnnnnnnnnnnnnnnnnnnnnnnnnnnnnnnnnnnnnnnnnnnnnnnnnnnnnnnnnnnnnnnnnnnnnnnnnnnnnnnnnnnnnnnnnnnnnnnnnnnnnnnnnnnnnnnnnnnnnnnnnnnnnnnnnnnnnnnnnnnnnnnnnnnnnnnnnnnnnnnnnnnnnnnnnnnnnnnnnnnnnnnnnnnnnnnnnnnnnnnnnnnnnnnnnnnnnnnnnnnnnnnnnnnnnnnnnnnnnnnnnnnnnnnnnnnnnnnnnnnnnnnnnnnnnnnnnnnnnnnnnnnnnnnnnnnnnnnnnnnnnnnnnnnnnnnnnnnnnnnnnnnnnnnnnnnnnnnnnnnnnnnnnnnnnnnnnnnnnnnnnnnnnnnnnnnnnnnnnnnnnnnnnnnnnnnnnnnnnnnnnnnnnnnnnnnnnnnnnnnnnnnnnnnnnnnnnnnnnnnnnnnnnnnnnnnnnnnnnnnnnnnnnnnnnnnnnnnnnnnnnnnnnnnnnnnnnnnnnnnnnnnnnnnnnnnnnnnnnnnnnnnnnnnnnnnnnnnnnnnnnnnnnnnnnnnnnnnnnnnnnnnnnnnnnnnnnnnnnnnnnnnnnnnnnnnnnnnnnnnnnnnnnnnnnnnnnnnnnnnnnnnnnnnnnnnnnnnnnnnnnnnnnnnnnnnnnnnnnnnnnnnnnnnnnnnnnnnnnnnnnnnnnnnnnnnnnnnnnnnnnnnnnnnnnnnnnnnnnnnnnnnnnnnnnnnnnnnnnnnnnnnnnnnnnnnnnnnnnnnnnnnnnnnnnnnnnnnnnnnnnnnnnnnnnnnnnnnnnnnnnnnnnnnnnnnnnnnnnnnnnnnnnnnnnnnnnnnnnnnnnnnnnnnnnnnnnnnnnnnnnnnnnnnnnnnnnnnnnnnnnnnnnnnnnnnnnnnnnnnnnnnnnnnnnnnnnnnnnnnnnnnnnnnnnnnnnnnnnnnnnnnnnnnnnnnnnnnnnnnnnnnnnnnnnnnnnnnnnnnnnnnnnnnnnnnnnnnnnnnnnnnnnnnnnnnnnnnnnnnnnnnnnnnnnnnnnnnnnnnnnnnnnnnnnnnnnnnnnnnnnnnnnnnnnnnnnnnnnnnnnnnnnnnnnnnnnnnnnnnnnnnnnnnnnnnnnnnnnnnnnnnnnnnnnnnnnnnnnnnnnnnnnnnnnnnnnnnnnnnnnnnnnnnnnnnnnnnnnnnnnnnnnnnnnnnnnnnnnnnnnnnnnnnnnnnnnnnnnnnnnnnnnnnnnnnnnnnnnnnnnnnnnnnnnnnnnnnnnnnnnnnnnnnnnnnnnnnnnnnnnnnnnnnnnnnnnnnnnnnnnnnnnnnnnnnnnnnnnnnnnnnnnnnnnnnnnnnnnnnnnnnnnnnnnnnnnnnnnnnnnnnnnnnnnnnnnnnnnnnnnnnnnnnnnnnnnnnnnnnnnnnnnnnnnnnnnnnnnnnnnnnnnnnnnnnnnnnnnnnnnnnnnnnnnnnnnnnnnnnnnnnnnnnnnnnnnnnnnnnnnnnnnnnnnnnnnnnnnnnnnnnnnnnnnnnnnnnnnnnnnnnnnnnnnnnnnnnnnnnnnnnnnnnnnnnnnnnnnnnnnnnnnnnnnnnnnnnnnnnnnnnnnnnnnnnnnnnnnnnnnnnnnnnnnnnnnnnnnnnnnnnnnnnnnnnnnnnnnnnnnnnnnnnnnnnnnnnnnnnnnnnnnnnnnnnnnnnnnnnnnnnnnnnnnnnnnnnnnnnnnnnnnnnnnnnnnnnnnnnnnnnnnnnnnnnnnnnnnnnnnnnnnnnnnnnnnnnnnnnnnnnnnnnnnnnnnnnnnnnnnnnnnnnnnnnnnnnnnnnnnnnnnnnnnnnnnnnnnnnnnnnnnnnnnnnnnnnnnnnnnnnnnnnnnnnnnnnnnnnnnnnnnnnnnnnnnnnnnnnnnnnnnnnnnnnnnnnnnnnnnnnnnnnnnnnnnnnnnnnnnnnnnnnnnnnnnnnnnnnnnnnnnnnnnnnnnnnnnnnnnnnnnnnnnnnnnnnnnnnnnnnnnnnnnnnnnnnnnnnnnnnnnnnnnnnnnnnnnnnnnnnnnnnnnnnnnnnnnnnnnnnnnnnnnnnnnnnnnnnnnnnnnnnnnnnnnnnnnnnnnnnnnnnnnnnnnnnnnnnnnnnnnnnnnnnnnnnnnnnnnnnnnnnnnnnnnnnnnnnnnnnnnnnnnnnnnnnnnnnnnnnnnnnnnnnnnnnnnnnnnnnnnnnnnnnnnnnnnnnnnnnnnnnnnnnnnnnnnnnnnnnnnnnnnnnnnnnnnnnnnnnnnnnnnnnnnnnnnnnnnnnnnnnnnnnnnnnnnnnnnnnnnnnnnnnnnnnnnnnnnnnnnnnnnnnnnnnnnnnnnnnnnnnnnnnnnnnnnnnnnnnnnnnnnnnnnnnnnnnnnnnnnnnnnnnnnnnnnnnnnnnnnnnnnnnnnnnnnnnnnnnnnnnnnnnnnnnnnnnnnnnnnnnnnnnnnnnnnnnnnnnnnnnnnnnnnnnnnnnnnnnnnnnnnnnnnnnnnnnnnnnnnnnnnnnnnnnnnnnnnnnnnnnnnnnnnnnnnnnnnnnnnnnnnnnnnnnnnnnnnnnnnnnnnnnnnnnnnnnnnnnnnnnnnnnnnnnnnnnnnnnnnnnnnnnnnnnnnnnnnnnnnnnnnnnnnnnnnnnnnnnnnnnnnnnnnnnnnnnnnnnnnnnnnnnnnnnnnnnnnnnnnnnnnnnnnnnnnnnnnnnnnnnnnnnnnnnnnnnnnnnnnnnnnnnnnnnnnnnnnnnnnnnnnnnnnnnnnnnnnnnnnnnnnnnnnnnnnnnnnnnnnnnnnnnnnnnnnnnnnnnnnnnnnnnnnnnnnnnnnnnnnnnnnnnnnnnnnnnnnnnnnnnnnnnnnnnnnnnnnnnnnnnnnnnnnnnnnnnnnnnnnnnnnnnnnnnnnnnnnnnnnnnnnnnnnnnnnnnnnnnnnnnnnnnnnnnnnnnnnnnnnnnnnnnnnnnnnnnnnnnnnnnnnnnnnnnnnnnnnnnnnnnnnnnnnnnnnnnnnnnnnnnnnnnnnnnnnnnnnnnnnnnnnnnnnnnnnnnnnnnnnnnnnnnnnnnnnnnnnnnnnnnnnnnnnnnnnnnnnnnnnnnnnnnnnnnnnnnnnnnnnnnnnnnnnnnnnnnnnnnnnnnnnnnnnnnnnnnnnnnnnnnnnnnnnnnnnnnnnnnnnnnnnnnnnnnnnnnnnnnnnnnnnnnnnnnnnnnnnnnnnnnnnnnnnnnnnnnnnnnnnnnnnnnnnnnnnnnnnnnnnnnnnnnnnnnnnnnnnnnnnnnnnnnnnnnnnnnnnnnnnnnnnnnnnnnnnnnnnnnnnnnnnnnnnnnnnnnnnnnnnnnnnnnnnnnnnnnnnnnnnnnnnnnnnnnnnnnnnnnnnnnnnnnnnnnnnnnnnnnnnnnnnnnnnnnnnnnnnnnnnnnnnnnnnnnnnnnnnnnnnnnnnnnnnnnnnnnnnnnnnnnnnnnnnnnnnnnnnnnnnnnnnnnnnnnnnnnnnnnnnnnnnnnnnnnnnnnnnnnnnnnnnnnnnnnnnnnnnnnnnnnnnnnnnnnnnnnnnnnnnnnnnnnnnnnnnnnnnnnnnnnnnnnnnnnnnnnnnnnnnnnnnnnnnnnnnnnnnnnnnnnnnnnnnnnnnnnnnnnnnnnnnnnnnnnnnnnnnnnnnnnnnnnnnnnnnnnnnnnnnnnnnnnnnnnnnnnnnnnnnnnnnnnnnnnnnnnnnnnnnnnnnnnnnnnnnnnnnnnnnnnnnnnnnnnnnnnnnnnnnnnnnnnnnnnnnnnnnnnnnnnnnnnnnnnnnnnnnnnnnnnnnnnnnnnnnnnnnnnnnnnnnnnnnnnnnnnnnnnnnnnnnnnnnnnnnnnnnnnnnnnnnnnnnnnnnnnnnnnnnnnnnnnnnnnnnnnnnnnnnnnnnnnnnnnnnnnnnnnnnnnnnnnnnnnnnnnnnnnnnnnnnnnnnnnnnnnnnnnnnnnnnnnnnnnnnnnnnnnnnnnnnnnnnnnnnnnnnnnnnnnnnnnnnnnnnnnnnnnnnnnnnnnnnnnnnnnnnnnnnnnnnnnnnnnnnnnnnnnnnnnnnnnnnnnnnnnnnnnnnnnnnnnnnnnnnnnnnnnnnnnnnnnnnnnnnnnnnnnnnnnnnnnnnnnnnnnnnnnnnnnnnnnnnnnnnnnnnnnnnnnnnnnnnnnnnnnnnnnnnnnnnnnnnnnnnnnnnnnnnnnnnnnnnnnnnnnnnnnnnnnnnnnnnnnnnnnnnnnnnnnnnnnnnnnnnnnnnnnnnnnnnnnnnnnnnnnnnnnnnnnnnnnnnnnnnnnnnnnnnnnnnnnnnnnnnnnnnnnnnnnnnnnnnnnnnnnnnnnnnnnnnnnnnnnnnnnnnnnnnnnnnnnnnnnnnnnnnnnnnnnnnnnnnnnnnnnnnnnnnnnnnnnnnnnnnnnnnnnnnnnnnnnnnnnnnnnnnnnnnnnnnnnnnnnnnnnnnnnnnnnnnnnnnnnnnnnnnnnnnnnnnnnnnnnnnnnnnnnnnnnnnnnnnnnnnnnnnnnnnnnnnnnnnnnnnnnnnnnnnnnnnnnnnnnnnnnnnnnnnnnnnnnnnnnnnnnnnnnnnnnnnnnnnnnnnnnnnnnnnnnnnnnnnnnnnnnnnnnnnnnnnnnnnnnnnnnnnnnnnnnnnnnnnnnnnnnnnnnnnnnnnnnnnnnnnnnnnnnnnnnnnnnnnnnnnnnnnnnnnnnnnnnnnnnnnnnnnnnnnnnnnnnnnnnnnnnnnnnnnnnnnnnnnnnnnnnnnnnnnnnnnnnnnnnnnnnnnnnnnnnnnnnnnnnnnnnnnnnnnnnnnnnnnnnnnnnnnnnnnnnnnnnnnnnnnnnnnnnnnnnnnnnnnnnnnnnnnnnnnnnnnnnnnnnnnnnnnnnnnnnnnnnnnnnnnnnnnnnnnnnnnnnnnnnnnnnnnnnnnnnnnnnnnnnnnnnnnnnnnnnnnnnnnnnnnnnnnnnnnnnnnnnnnnnnnnnnnnnnnnnnnnnnnnnnnnnnnnnnnnnnnnnnnnnnnnnnnnnnnnnnnnnnnnnnnnnnnnnnnnnnnnnnnnnnnnnnnnnnnnnnnnnnnnnnnnnnnnnnnnnnnnnnnnnnnnnnnnnnnnnnnnnnnnnnnnnnnnnnnnnnnnnnnnnnnnnnnnnnnnnnnnnnnnnnnnnnnnnnnnnnnnnnnnnnnnnnnnnnnnnnnnnnnnnnnnnnnnnnnnnnnnnnnnnnnnnnnnnnnnnnnnnnnnnnnnnnnnnnnnnnnnnnnnnnnnnnnnnnnnnnnnnnnnnnnnnnnnnnnnnnnnnnnnnnnnnnnnnnnnnnnnnnnnnnnnnnnnnnnnnnnnnnnnnnnnnnnnnnnnnnnnnnnnnnnnnnnnnnnnnnnnnnnnnnnnnnnnnnnnnnnnnnnnnnnnnnnnnnnnnnnnnnnnnnnnnnnnnnnnnnnnnnnnnnnnnnnnnnnnnnnnnnnnnnnnnnnnnnnnnnnnnnnnnnnnnnnnnnnnnnnnnnnnnnnnnnnnnnnnnnnnnnnnnnnnnnnnnnnnnnnnnnnnnnnnnnnnnnnnnnnnnnnnnnnnnnnnnnnnnnnnnnnnnnnnnnnnnnnnnnnnnnnnnnnnnnnnnnnnnnnnnnnnnnnnnnnnnnnnnnnnnnnnnnnnnnnnnnnnnnnnnnnnnnnnnnnnnnnnnnnnnnnnnnnnnnnnnnnnnnnnnnnnnnnnnnnnnnnnnnnnnnnnnnnnnnnnnnnnnnnnnnnnnnnnnnnnnnnnnnnnnnnnnnnnnnnnnnnnnnnnnnnnnnnnnnnnnnnnnnnnnnnnnnnnnnnnnnnnnnnnnnnnnnnnnnnnnnnnnnnnnnnnnnnnnnnnnnnnnnnnnnnnnnnnnnnnnnnnnnnnnnnnnnnnnnnnnnnnnnnnnnnnnnnnnnnnnnnnnnnnnnnnnnnnnnnnnnnnnnnnnnnnnnnnnnnnnnnnnnnnnnnnnnnnnnnnnnnnnnnnnnnnnnnnnnnnnnnnnnnnnnnnnnnnnnnnnnnnnnnnnnnnnnnnnnnnnnnnnnnnnnnnnnnnnnnnnnnnnnnnnnnnnnnnnnnnnnnnnnnnnnnnnnnnnnnnnnnnnnnnnnnnnnnnnnnnnnnnnnnnnnnnnnnnnnnnnnnnnnnnnnnnnnnnnnnnnnnnnnnnnnnnnnnnnnnnnnnnnnnnnnnnnnnnnnnnnnnnnnnnnnnnnnnnnnnnnnnnnnnnnnnnnnnnnnnnnnnnnnnnnnnnnnnnnnnnnnnnnnnnnnnnnnnnnnnnnnnnnnnnnnnnnnnnnnnnnnnnnnnnnnnnnnnnnnnnnnnnnnnnnnnnnnnnnnnnnnnnnnnnnnnnnnnnnnnnnnnnnnnnnnnnnnnnnnnnnnnnnnnnnnnnnnnnnnnnnnnnnnnnnnnnnnnnnnnnnnnnnnnnnnnnnnnnnnnnnnnnnnnnnnnnnnnnnnnnnnnnnnnnnnnnnnnnnnnnnnnnnnnnnnnnnnnnnnnnnnnnnnnnnnnnnnnnnnnnnnnnnnnnnnnnnnnnnnnnnnnnnnnnnnnnnnnnnnnnnnnnnnnnnnnnnnnnnnnnnnnnnnnnnnnnnnnnnnnnnnnnnnnnnnnnnnnnnnnnnnnnnnnnnnnnnnnnnnnnnnnnnnnnnnnnnnnnnnnnnnnnnnnnnnnnnnnnnnnnnnnnnnnnnnnnnnnnnnnnnnnnnnnnnnnnnnnnnnnnnnnnnnnnnnnnnnnnnnnnnnnnnnnnnnnnnnnnnnnnnnnnnnnnnnnnnnnnnnnnnnnnnnnnnnnnnnnnnnnnnnnnnnnnnnnnnnnnnnnnnnnnnnnnnnnnnnnnnnnnnnnnnnnnnnnnnnnnnnnnnnnnnnnnnnnnnnnnnnnnnnnnnnnnnnnnnnnnnnnnnnnnnnnnnnnnnnnnnnnnnnnnnnnnnnnnnnnnnnnnnnnnnnnnnnnnnnnnnnnnnnnnnnnnnnnnnnnnnnnnnnnnnnnnnnnnnnnnnnnnnnnnnnnnnnnnnnnnnnnnnnnnnnnnnnnnnnnnnnnnnnnnnnnnnnnnnnnnnnnnnnnnnnnnnnnnnnnnnnnnnnnnnnnnnnnnnnnnnnnnnnnnnnnnnnnnnnnnnnnnnnnnnnnnnnnnnnnnnnnnnnnnnnnnnnnnnnnnnnnnnnnnnnnnnnnnnnnnnnnnnnnnnnnnnnnnnnnnnnnnnnnnnnnnnnnnnnnnnnnnnnnnnnnnnnnnnnnnnnnnnnnnnnnnnnnnnnnnnnnnnnnnnnnnnnnnnnnnnnnnnnnnnnnnnnnnnnnnnnnnnnnnnnnnnnnnnnnnnnnnnnnnnnnnnnnnnnnnnnnnnnnnnnnnnnnnnnnnnnnnnnnnnnnnnnnnnnnnnnnnnnnnnnnnnnnnnnnnnnnnnnnnnnnnnnnnnnnnnnnnnnnnnnnnnnnnnnnnnnnnnnnnnnnnnnnnnnnnnnnnnnnnnnnnnnnnnnnnnnnnnnnnnnnnnnnnnnnnnnnnnnnnnnnnnnnnnnnnnnnnnnnnnnnnnnnnnnnnnnnnnnnnnnnnnnnnnnnnnnnnnnnnnnnnnnnnnnnnnnnnnnnnnnnnnnnnnnnnnnnnnnnnnnnnnnnnnnnnnnnnnnnnnnnnnnnnnnnnnnnnnnnnnnnnnnnnnnnnnnnnnnnnnnnnnnnnnnnnnnnnnnnnnnnnnnnnnnnnnnnnnnnnnnnnnnnnnnnnnnnnnnnnnnnnnnnnnnnnnnnnnnnnnnnnnnnnnnnnnnnnnnnnnnnnnnnnnnnnnnnnnnnnnnnnnnnnnnnnnnnnnnnnnnnnnnnnnnnnnnnnnnnnnnnnnnnnnnnnnnnnnnnnnnnnnnnnnnnnnnnnnnnnnnnnnnnnnnnnnnnnnnnnnnnnnnnnnnnnnnnnnnnnnnnnnnnnnnnnnnnnnnnnnnnnnnnnnnnnnnnnnnnnnnnnnnnnnnnnnnnnnnnnnnnnnnnnnnnnnnnnnnnnnnnnnnnnnnnnnnnnnnnnnnnnnnnnnnnnnnnnnnnnnnnnnnnnnnnnnnnnnnnnnnnnnnnnnnnnnnnnnnnnnnnnnnnnnnnnnnnnnnnnnnnnnnnnnnnnnnnnnnnnnnnnnnnnnnnnnnnnnnnnnnnnnnnnnnnnnnnnnnnnnnnnnnnnnnnnnnnnnnnnnnnnnnnnnnnnnnnnnnnnnnnnnnnnnnnnnnnnnnnnnnnnnnnnnnnnnnnnnnnnnnnnnnnnnnnnnnnnnnnnnnnnnnnnnnnnnnnnnnnnnnnnnnnnnnnnnnnnnnnnnnnnnnnnnnnnnnnnnnnnnnnnnnnnnnnnnnnnnnnnnnnnnnnnnnnnnnnnnnnnnnnnnnnnnnnnnnnnnnnnnnnnnnnnnnnnnnnnnnnnnnnnnnnnnnnnnnnnnnnnnnnnnnnnnnnnnnnnnnnnnnnnnnnnnnnnnnnnnnnnnnnnnnnnnnnnnnnnnnnnnnnnnnnnnnnnnnnnnnnnnnnnnnnnnnnnnnnnnnnnnnnnnnnnnnnnnnnnnnnnnnnnnnnnnnnnnnnnnnnnnnnnnnnnnnnnnnnnnnnnnnnnnnnnnnnnnnnnnnnnnnnnnnnnnnnnnnnnnnnnnnnnnnnnnnnnnnnnnnnnnnnnnnnnnnnnnnnnnnnnnnnnnnnnnnnnnnnnnnnnnnnnnnnnnnnnnnnnnnnnnnnnnnnnnnnnnnnnnnnnnnnnnnnnnnnnnnnnnnnnnnnnnnnnnnnnnnnnnnnnnnnnnnnnnnnnnnnnnnnnnnnnnnnnnnnnnnnnnnnnnnnnnnnnnnnnnnnnnnnnnnnnnnnnnnnnnnnnnnnnnnnnnnnnnnnnnnnnnnnnnnnnnnnnnnnnnnnnnnnnnnnnnnnnnnnnnnnnnnnnnnnnnnnnnnnnnnnnnnnnnnnnnnnnnnnnnnnnnnnnnnnnnnnnnnnnnnnnnnnnnnnnnnnnnnnnnnnnnnnnnnnnnnnnnnnnnnnnnnnnnnnnnnnnnnnnnnnnnnnnnnnnnnnnnnnnnnnnnnnnnnnnnnnnnnnnnnnnnnnnnnnnnnnnnnnnnnnnnnnnnnnnnnnnnnnnnnnnnnnnnnnnnnnnnnnnnnnnnnnnnnnnnnnnnnnnnnnnnnnnnnnnnnnnnnnnnnnnnnnnnnnnnnnnnnnnnnnnnnnnnnnnnnnnnnnnnnnnnnnnnnnnnnnnnnnnnnnnnnnnnnnnnnnnnnnnnnnnnnnnnnnnnnnnnnnnnnnnnnnnnnnnnnnnnnnnnnnnnnnnnnnnnnnnnnnnnnnnnnnnnnnnnnnnnnnnnnnnnnnnnnnnnnnnnnnnnnnnnnnnnnnnnnnnnnnnnnnnnnnnnnnnnnnnnnnnnnnnnnnnnnnnnnnnnnnnnnnnnnnnnnnnnnnnnnnnnnnnnnnnnnnnnnnnnnnnnnnnnnnnnnnnnnnnnnnnnnnnnnnnnnnnnnnnnnnnnnnnnnnnnnnnnnnnnnnnnnnnnnnnnnnnnnnnnnnnnnnnnnnnnnnnnnnnnnnnnnnnnnnnnnnnnnnnnnnnnnnnnnnnnnnnnnnnnnnnnnnnnnnnnnnnnnnnnnnnnnnnnnnnnnnnnnnnnnnnnnnnnnnnnnnnnnnnnnnnnnnnnnnnnnnnnnnnnnnnnnnnnnnnnnnnnnnnnnnnnnnnnnnnnnnnnnnnnnnnnnnnnnnnnnnnnnnnnnnnnnnnnnnnnnnnnnnnnnnnnnnnnnnnnnnnnnnnnnnnnnnnnnnnnnnnnnnnnnnnnnnnnnnnnnnnnnnnnnnnnnnnnnnnnnnnnnnnnnnnnnnnnnnnnnnnnnnnnnnnnnnnnnnnnnnnnnnnnnnnnnnnnnnnnnnnnnnnnnnnnnnnnnnnnnnnnnnnnnnnnnnnnnnnnnnnnnnnnnnnnnnnnnnnnnnnnnnnnnnnnnnnnnnnnnnnnnnnnnnnnnnnnnnnnnnnnnnnnnnnnnnnnnnnnnnnnnnnnnnnnnnnnnnnnnnnnnnnnnnnnnnnnnnnnnnnnnnnnnnnnnnnnnnnnnnnnnnnnnnnnnnnnnnnnnnnnnnnnnnnnnnnnnnnnnnnnnnnnnnnnnnnnnnnnnnnnnnnnnnnnnnnnnnnnnnnnnnnnnnnnnnnnnnnnnnnnnnnnnnnnnnnnnnnnnnnnnnnnnnnnnnnnnnnnnnnnnnnnnnnnnnnnnnnnnnnnnnnnnnnnnnnnnnnnnnnnnnnnnnnnnnnnnnnnnnnnnnnnnnnnnnnnnnnnnnnnnnnnnnnnnnnnnnnnnnnnnnnnnnnnnnnnnnnnnnnnnnnnnnnnnnnnnnnnnnnnnnnnnnnnnnnnnnnnnnnnnnnnnnnnnnnnnnnnnnnnnnnnnnnnnnnnnnnnnnnnnnnnnnnnnnnnnnnnnnnnnnnnnnnnnnnnnnnnnnnnnnnnnnnnnnnnnnnnnnnnnnnnnnnnnnnnnnnnnnnnnnnnnnnnnnnnnnnnnnnnnnnnnnnnnnnnnnnnnnnnnnnnnnnnnnnnnnnnnnnnnnnnnnnnnnnnnnnnnnnnnnnnnnnnnnnnnnnnnnnnnnnnnnnnnnnnnnnnnnnnnnnnnnnnnnnnnnnnnnnnnnnnnnnnnnnnnnnnnnnnnnnnnnnnnnnnnnnnnnnnnnnnnnnnnnnnnnnnnnnnnnnnnnnnnnnnnnnnnnnnnnnnnnnnnnnnnnnnnnnnnnnnnnnnnnnnnnnnnnnnnnnnnnnnnnnnnnnnnnnnnnnnnnnnnnnnnnnnnnnnnnnnnnnnnnnnnnnnnnnnnnnnnnnnnnnnnnnnnnnnnnnnnnnnnnnnnnnnnnnnnnnnnnnnnnnnnnnnnnnnnnnnnnnnnnnnnnnnnnnnnnnnnnnnnnnnnnnnnnnnnnnnnnnnnnnnnnnnnnnnnnnnnnnnnnnnnnnnnnnnnnnnnnnnnnnnnnnnnnnnnnnnnnnnnnnnnnnnnnnnnnnnnnnnnnnnnnnnnnnnnnnnnnnnnnnnnnnnnnnnnnnnnnnnnnnnnnnnnnnnnnnnnnnnnnnnnnnnnnnnnnnnnnnnnnnnnnnnnnnnnnnnnnnnnnnnnnnnnnnnnnnnnnnnnnnnnnnnnnnnnnnnnnnnnnnnnnnnnnnnnnnnnnnnnnnnnnnnnnnnnnnnnnnnnnnnnnnnnnnnnnnnnnnnnnnnnnnnnnnnnnnnnnnnnnnnnnnnnnnnnnnnnnnnnnnnnnnnnnnnnnnnnnnnnnnnnnnnnnnnnnnnnnnnnnnnnnnnnnnnnnnnnnnnnnnnnnnnnnnnnnnnnnnnnnnnnnnnnnnnnnnnnnnnnnnnnnnnnnnnnnnnnnnnnnnnnnnnnnnnnnnnnnnnnnnnnnnnnnnnnnnnnnnnnnnnnnnnnnnnnnnnnnnnnnnnnnnnnnnnnnnnnnnnnnnnnnnnnnnnnnnnnnnnnnnnnnnnnnnnnnnnnnnnnnnnnnnnnnnnnnnnnnnnnnnnnnnnnnnnnnnnnnnnnnnnnnnnnnnnnnnnnnnnnnnnnnnnnnnnnnnnnnnnnnnnnnnnnnnnnnnnnnnnnnnnnnnnnnnnnnnnnnnnnnnnnnnnnnnnnnnnnnnnnnnnnnnnnnnnnnnnnnnnnnnnnnnnnnnnnnnnnnnnnnnnnnnnnnnnnnnnnnnnnnnnnnnnnnnnnnnnnnnnnnnnnnnnnnnnnnnnnnnnnnnnnnnnnnnnnnnnnnnnnnnnnnnnnnnnnnnnnnnnnnnnnnnnnnnnnnnnnnnnnnnnnnnnnnnnnnnnnnnnnnnnnnnnnnnnnnnnnnnnnnnnnnnnnnnnnnnnnnnnnnnnnnnnnnnnnnnnnnnnnnnnnnnnnnnnnnnnnnnnnnnnnnnnnnnnnnnnnnnnnnnnnnnnnnnnnnnnnnnnnnnnnnnnnnnnnnnnnnnnnnnnnnnnnnnnnnnnnnnnnnnnnnnnnnnnnnnnnnnnnnnnnnnnnnnnnnnnnnnnnnnnnnnnnnnnnnnnnnnnnnnnnnnnnnnnnnnnnnnnnnnnnnnnnnnnnnnnnnnnnnnnnnnnnnnnnnnnnnnnnnnnnnnnnnnnnnnnnnnnnnnnnnnnnnnnnnnnnnnnnnnnnnnnnnnnnnnnnnnnnnnnnnnnnnnnnnnnnnnnnnnnnnnnnnnnnnnnnnnnnnnnnnnnnnnnnnnnnnnnnnnnnnnnnnnnnnnnnnnnnnnnnnnnnnnnnnnnnnnnnnnnnnnnnnnnnnnnnnnnnnnnnnnnnnnnnnnnnnnnnnnnnnnnnnnnnnnnnnnnnnnnnnnnnnnnnnnnnnnnnnnnnnnnnnnnnnnnnnnnnnnnnnnnnnnnnnnnnnnnnnnnnnnnnnnnnnnnnnnnnnnnnnnnnnnnnnnnnnnnnnnnnnnnnnnnnnnnnnnnnnnnnnnnnnnnnnnnnnnnnnnnnnnnnnnnnnnnnnnnnnnnnnnnnnnnnnnnnnnnnnnnnnnnnnnnnnnnnnnnnnnnnnnnnnnnnnnnnnnnnnnnnnnnnnnnnnnnnnnnnnnnnnnnnnnnnnnnnnnnnnnnnnnnnnnnnnnnnnnnnnnnnnnnnnnnnnnnnnnnnnnnnnnnnnnnnnnnnnnnnnnnnnnnnnnnnnnnnnnnnnnnnnnnnnnnnnnnnnnnnnnnnnnnnnnnnnnnnnnnnnnnnnnnnnnnnnnnnnnnnnnnnnnnnnnnnnnnnnnnnnnnnnnnnnnnnnnnnnnnnnnnnnnnnnnnnnnnnnnnnnnnnnnnnnnnnnnnnnnnnnnnnnnnnnnnnnnnnnnnnnnnnnnnnnnnnnnnnnnnnnnnnnnnnnnnnnnnnnnnnnnnnnnnnnnnnnnnnnnnnnnnnnnnnnnnnnnnnnnnnnnnnnnnnnnnnnnnnnnnnnnnnnnnnnnnnnnnnnnnnnnnnnnnnnnnnnnnnnnnnnnnnnnnnnnnnnnnnnnnnnnnnnnnnnnnnnnnnnnnnnnnnnnnnnnnnnnnnnnnnnnnnnnnnnnnnnnnnnnnnnnnnnnnnnnnnnnnnnnnnnnnnnnnnnnnnnnnnnnnnnnnnnnnnnnnnnnnnnnnnnnnnnnnnnnnnnnnnnnnnnnnnnnnnnnnnnnnnnnnnnnnnnnnnnnnnnnnnnnnnnnnnnnnnnnnnnnnnnnnnnnnnnnnnnnnnnnnnnnnnnnnnnnnnnnnnnnnnnnnnnnnnnnnnnnnnnnnnnnnnnnnnnnnnnnnnnnnnnnnnnnnnnnnnnnnnnnnnnnnnnnnnnnnnnnnnnnnnnnnnnnnnnnnnnnnnnnnnnnnnnnnnnnnnnnnnnnnnnnnnnnnnnnnnnnnnnnnnnnnnnnnnnnnnnnnnnnnnnnnnnnnnnnnnnnnnnnnnnnnnnnnnnnnnnnnnnnnnnnnnnnnnnnnnnnnnnnnnnnnnnnnnnnnnnnnnnnnnnnnnnnnnnnnnnnnnnnnnnnnnnnnnnnnnnnnnnnnnnnnnnnnnnnnnnnnnnnnnnnnnnnnnnnnnnnnnnnnnnnnnnnnnnnnnnnnnnnnnnnnnnnnnnnnnnnnnnnnnnnnnnnnnnnnnnnnnnnnnnnnnnnnnnnnnnnnnnnnnnnnnnnnnnnnnnnnnnnnnnnnnnnnnnnnnnnnnnnnnnnnnnnnnnnnnnnnnnnnnnnnnnnnnnnnnnnnnnnnnnnnnnnnnnnnnnnnnnnnnnnnnnnnnnnnnnnnnnnnnnnnnnnnnnnnnnnnnnnnnnnnnnnnnnnnnnnnnnnnnnnnnnnnnnnnnnnnnnnnnnnnnnnnnnnnnnnnnnnnnnnnnnnnnnnnnnnnnnnnnnnnnnnnnnnnnnnnnnnnnnnnnnnnnnnnnnnnnnnnnnnnnnnnnnnnnnnnnnnnnnnnnnnnnnnnnnnnnnnnnnnnnnnnnnnnnnnnnnnnnnnnnnnnnnnnnnnnnnnnnnnnnnnnnnnnnnnnnnnnnnnnnnnnnnnnnnnnnnnnnnnnnnnnnnnnnnnnnnnnnnnnnnnnnnnnnnnnnnnnnnnnnnnnnnnnnnnnnnnnnnnnnnnnnnnnnnnnnnnnnnnnnnnnnnnnnnnnnnnnnnnnnnnnnnnnnnnnnnnnnnnnnnnnnnnnnnnnnnnnnnnnnnnnnnnnnnnnnnnnnnnnnnnnnnnnnnnnnnnnnnnnnnnnnnnnnnnnnnnnnnnnnnnnnnnnnnnnnnnnnnnnnnnnnnnnnnnnnnnnnnnnnnnnnnnnnnnnnnnnnnnnnnnnnnnnnnnnnnnnnnnnnnnnnnnnnnnnnnnnnnnnnnnnnnnnnnnnnnnnnnnnnnnnnnnnnnnnnnnnnnnnnnnnnnnnnnnnnnnnnnnnnnnnnnnnnnnnnnnnnnnnnnnnnnnnnnnnnnnnnnnnnnnnnnnnnnnnnnnnnnnnnnnnnnnnnnnnnnnnnnnnnnnnnnnnnnnnnnnnnnnnnnnnnnnnnnnnnnnnnnnnnnnnnnnnnnnnnnnnnnnnnnnnnnnnnnnnnnnnnnnnnnnnnnnnnnnnnnnnnnnnnnnnnnnnnnnnnnnnnnnnnnnnnnnnnnnnnnnnnnnnnnnnnnnnnnnnnnnnnnnnnnnnnnnnnnnnnnnnnnnnnnnnnnnnnnnnnnnnnnnnnnnnnnnnnnnnnnnnnnnnnnnnnnnnnnnnnnnnnnnnnnnnnnnnnnnnnnnnnnnnnnnnnnnnnnnnnnnnnnnnnnnnnnnnnnnnnnnnnnnnnnnnnnnnnnnnnnnnnnnnnnnnnnnnnnnnnnnnnnnnnnnnnnnnnnnnnnnnnnnnnnnnnnnnnnnnnnnnnnnnnnnnnnnnnnnnnnnnnnnnnnnnnnnnnnnnnnnnnnnnnnnnnnnnnnnnnnnnnnnnnnnnnnnnnnnnnnnnnnnnnnnnnnnnnnnnnnnnnnnnnnnnnnnnnnnnnnnnnnnnnnnnnnnnnnnnnnnnnnnnnnnnnnnnnnnnnnnnnnnnnnnnnnnnnnnnnnnnnnnnnnnnnnnnnnnnnnnnnnnnnnnnnnnnnnnnnnnnnnnnnnnnnnnnnnnnnnnnnnnnnnnnnnnnnnnnnnnnnnnnnnnnnnnnnnnnnnnnnnnnnnnnnnnnnnnnnnnnnnnnnnnnnnnnnnnnnnnnnnnnnnnnnnnnnnnnnnnnnnnnnnnnnnnnnnnnnnnnnnnnnnnnnnnnnnnnnnnnnnnnnnnnnnnnnnnnnnnnnnnnnnnnnnnnnnnnnnnnnnnnnnnnnnnnnnnnnnnnnnnnnnnnnnnnnnnnnnnnnnnnnnnnnnnnnnnnnnnnnnnnnnnnnnnnnnnnnnnnnnnnnnnnnnnnnnnnnnnnnnnnnnnnnnnnnnnnnnnnnnnnnnnnnnnnnnnnnnnnnnnnnnnnnnnnnnnnnnnnnnnnnnnnnnnnnnnnnnnnnnnnnnnnnnnnnnnnnnnnnnnnnnnnnnnnnnnnnnnnnnnnnnnnnnnnnnnnnnnnnnnnnnnnnnnnnnnnnnnnnnnnnnnnnnnnnnnnnnnnnnnnnnnnnnnnnnnnnnnnnnnnnnnnnnnnnnnnnnnnnnnnnnnnnnnnnnnnnnnnnnnnnnnnnnnnnnnnnnnnnnnnnnnnnnnnnnnnnnnnnnnnnnnnnnnnnnnnnnnnnnnnnnnnnnnnnnnnnnnnnnnnnnnnnnnnnnnnnnnnnnnnnnnnnnnnnnnnnnnnnnnnnnnnnnnnnnnnnnnnnnnnnnnnnnnnnnnnnnnnnnnnnnnnnnnnnnnnnnnnnnnnnnnnnnnnnnnnnnnnnnnnnnnnnnnnnnnnnnnnnnnnnnnnnnnnnnnnnnnnnnnnnnnnnnnnnnnnnnnnnnnnnnnnnnnnnnnnnnnnnnnnnnnnnnnnnnnnnnnnnnnnnnnnnnnnnnnnnnnnnnnnnnnnnnnnnnnnnnnnnnnnnnnnnnnnnnnnnnnnnnnnnnnnnnnnnnnnnnnnnnnnnnnnnnnnnnnnnnnnnnnnnnnnnnnnnnnnnnnnnnnnnnnnnnnnnnnnnnnnnnnnnnnnnnnnnnnnnnnnnnnnnnnnnnnnnnnnnnnnnnnnnnnnnnnnnnnnnnnnnnnnnnnnnnnnnnnnnnnnnnnnnnnnnnnnnnnnnnnnnnnnnnnnnnnnnnnnnnnnnnnnnnnnnnnnnnnnnnnnnnnnnnnnnnnnnnnnnnnnnnnnnnnnnnnnnnnnnnnnnnnnnnnnnnnnnnnnnnnnnnnnnnnnnnnnnnnnnnnnnnnnnnnnnnnnnnnnnnnnnnnnnnnnnnnnnnnnnnnnnnnnnnnnnnnnnnnnnnnnnnnnnnnnnnnnnnnnnnnnnnnnnnnnnnnnnnnnnnnnnnnnnnnnnnnnnnnnnnnnnnnnnnnnnnnnnnnnnnnnnnnnnnnnnnnnnnnnnnnnnnnnnnnnnnnnnnnnnnnnnnnnnnnnnnnnnnnnnnnnnnnnnnnnnnnnnnnnnnnnnnnnnnnnnnnnnnnnnnnnnnnnnnnnnnnnnnnnnnnnnnnnnnnnnnnnnnnnnnnnnnnnnnnnnnnnnnnnnnnnnnnnnnnnnnnnnnnnnnnnnnnnnnnnnnnnnnnnnnnnnnnnnnnnnnnnnnnnnnnnnnnnnnnnnnnnnnnnnnnnnnnnnnnnnnnnnnnnnnnnnnnnnnnnnnnnnnnnnnnnnnnnnnnnnnnnnnnnnnnnnnnnnnnnnnnnnnnnnnnnnnnnnnnnnnnnnnnnnnnnnnnnnnnnnnnnnnnnnnnnnnnnnnnnnnnnnnnnnnnnnnnnnnnnnnnnnnnnnnnnnnnnnnnnnnnnnnnnnnnnnnnnnnnnnnnnnnnnnnnnnnnnnnnnnnnnnnnnnnnnnnnnnnnnnnnnnnnnnnnnnnnnnnnnnnnnnnnnnnnnnnnnnnnnnnnnnnnnnnnnnnnnnnnnnnnnnnnnnnnnnnnnnnnnnnnnnnnnnnnnnnnnnnnnnnnnnnnnnnnnnnnnnnnnnnnnnnnnnnnnnnnnnnnnnnnnnnnnnnnnnnnnnnnnnnnnnnnnnnnnnnnnnnnnnnnnnnnnnnnnnnnnnnnnnnnnnnnnnnnnnnnnnnnnnnnnnnnnnnnnnnnnnnnnnnnnnnnnnnnnnnnnnnnnnnnnnnnnnnnnnnnnnnnnnnnnnnnnnnnnnnnnnnnnnnnnnnnnnnnnnnnnnnnnnnnnnnnnnnnnnnnnnnnnnnnnnnnnnnnnnnnnnnnnnnnnnnnnnnnnnnnnnnnnnnnnnnnnnnnnnnnnnnnnnnnnnnnnnnnnnnnnnnnnnnnnnnnnnnnnnnnnnnnnnnnnnnnnnnnnnnnnnnnnnnnnnnnnnnnnnnnnnnnnnnnnnnnnnnnnnnnnnnnnnnnnnnnnnnnnnnnnnnnnnnnnnnnnnnnnnnnnnnnnnnnnnnnnnnnnnnnnnnnnnnnnnnnnnnnnnnnnnnnnnnnnnnnnnnnnnnnnnnnnnnnnnnnnnnnnnnnnnnnnnnnnnnnnnnnnnnnnnnnnnnnnnnnnnnnnnnnnnnnnnnnnnnnnnnnnnnnnnnnnnnnnnnnnnnnnnnnnnnnnnnnnnnnnnnnnnnnnnnnnnnnnnnnnnnnnnnnnnnnnnnnnnnnnnnnnnnnnnnnnnnnnnnnnnnnnnnnnnnnnnnnnnnnnnnnnnnnnnnnnnnnnnnnnnnnnnnnnnnnnnnnnnnnnnnnnnnnnnnnnnnnnnnnnnnnnnnnnnnnnnnnnnnnnnnnnnnnnnnnnnnnnnnnnnnnnnnnnnnnnnnnnnnnnnnnnnnnnnnnnnnnnnnnnnnnnnnnnnnnnnnnnnnnnnnnnnnnnnnnnnnnnnnnnnnnnnnnnnnnnnnnnnnnnnnnnnnnnnnnnnnnnnnnnnnnnnnnnnnnnnnnnnnnnnnnnnnnnnnnnnnnnnnnnnnnnnnnnnnnnnnnnnnnnnnnnnnnnnnnnnnnnnnnnnnnnnnnnnnnnnnnnnnnnnnnnnnnnnnnnnnnnnnnnnnnnnnnnnnnnnnnnnnnnnnnnnnnnnnnnnnnnnnnnnnnnnnnnnnnnnnnnnnnnnnnnnnnnnnnnnnnnnnnnnnnnnnnnnnnnnnnnnnnnnnnnnnnnnnnnnnnnnnnnnnnnnnnnnnnnnnnnnnnnnnnnnnnnnnnnnnnnnnnnnnnnnnnnnnnnnnnnnnnnnnnnnnnnnnnnnnnnnnnnnnnnnnnnnnnnnnnnnnnnnnnnnnnnnnnnnnnnnnnnnnnnnnnnnnnnnnnnnnnnnnnnnnnnnnnnnnnnnnnnnnnnnnnnnnnnnnnnnnnnnnnnnnnnnnnnnnnnnnnnnnnnnnnnnnnnnnnnnnnnnnnnnnnnnnnnnnnnnnnnnnnnnnnnnnnnnnnnnnnnnnnnnnnnnnnnnnnnnnnnnnnnnnnnnnnnnnnnnnnnnnnnnnnnnnnnnnnnnnnnnnnnnnnnnnnnnnnnnnnnnnnnnnnnnnnnnnnnnnnnnnnnnnnnnnnnnnnnnnnnnnnnnnnnnnnnnnnnnnnnnnnnnnnnnnnnnnnnnnnnnnnnnnnnnnnnnnnnnnnnnnnnnnnnnnnnnnnnnnnnnnnnnnnnnnnnnnnnnnnnnnnnnnnnnnnnnnnnnnnnnnnnnnnnnnnnnnnnnnnnnnnnnnnnnnnnnnnnnnnnnnnnnnnnnnnnnnnnnnnnnnnnnnnnnnnnnnnnnnnnnnnnnnnnnnnnnnnnnnnnnnnnnnnnnnnnnnnnnnnnnnnnnnnnnnnnnnnnnnnnnnnnnnnnnnnnnnnnnnnnnnnnnnnnnnnnnnnnnnnnnnnnnnnnnnnnnnnnnnnnnnnnnnnnnnnnnnnnnnnnnnnnnnnnnnnnnnnnnnnnnnnnnnnnnnnnnnnnnnnnnnnnnnnnnnnnnnnnnnnnnnnnnnnnnnnnnnnnnnnnnnnnnnnnnnnnnnnnnnnnnnnnnnnnnnnnnnnnnnnnnnnnnnnnnnnnnnnnnnnnnnnnnnnnnnnnnnnnnnnnnnnnnnnnnnnnnnnnnnnnnnnnnnnnnnnnnnnnnnnnnnnnnnnnnnnnnnnnnnnnnnnnnnnnnnnnnnnnnnnnnnnnnnnnnnnnnnnnnnnnnnnnnnnnnnnnnnnnnnnnnnnnnnnnnnnnnnnnnnnnnnnnnnnnnnnnnnnnnnnnnnnnnnnnnnnnnnnnnnnnnnnnnnnnnnnnnnnnnnnnnnnnnnnnnnnnnnnnnnnnnnnnnnnnnnnnnnnnnnnnnnnnnnnnnnnnnnnnnnnnnnnnnnnnnnnnnnnnnnnnnnnnnnnnnnnnnnnnnnnnnnnnnnnnnnnnnnnnnnnnnnnnnnnnnnnnnnnnnnnnnnnnnnnnnnnnnnnnnnnnnnnnnnnnnnnnnnnnnnnnnnnnnnnnnnnnnnnnnnnnnnnnnnnnnnnnnnnnnnnnnnnnnnnnnnnnnnnnnnnnnnnnnnnnnnnnnnnnnnnnnnnnnnnnnnnnnnnnnnnnnnnnnnnnnnnnnnnnnnnnnnnnnnnnnnnnnnnnnnnnnnnnnnnnnnnnnnnnnnnnnnnnnnnnnnnnnnnnnnnnnnnnnnnnnnnnnnnnnnnnnnnnnnnnnnnnnnnnnnnnnnnnnnnnnnnnnnnnnnnnnnnnnnnnnnnnnnnnnnnnnnnnnnnnnnnnnnnnnnnnnnnnnnnnnnnnnnnnnnnnnnnnnnnnnnnnnnnnnnnnnnnnnnnnnnnnnnnnnnnnnnnnnnnnnnnnnnnnnnnnnnnnnnnnnnnnnnnnnnnnnnnnnnnnnnnnnnnnnnnnnnnnnnnnnnnnnnnnnnnnnnnnnnnnnnnnnnnnnnnnnnnnnnnnnnnnnnnnnnnnnnnnnnnnnnnnnnnnnnnnnnnnnnnnnnnnnnnnnnnnnnnnnnnnnnnnnnnnnnnnnnnnnnnnnnnnnnnnnnnnnnnnnnnnnnnnnnnnnnnnnnnnnnnnnnnnnnnnnnnnnnnnnnnnnnnnnnnnnnnnnnnnnnnnnnnnnnnnnnnnnnnnnnnnnnnnnnnnnnnnnnnnnnnnnnnnnnnnnnnnnnnnnnnnnnnnnnnnnnnnnnnnnnnnnnnnnnnnnnnnnnnnnnnnnnnnnnnnnnnnnnnnnnnnnnnnnnnnnnnnnnnnnnnnnnnnnnnnnnnnnnnnnnnnnnnnnnnnnnnnnnnnnnnnnnnnnnnnnnnnnnnnnnnnnnnnnnnnnnnnnnnnnnnnnnnnnnnnnnnnnnnnnnnnnnnnnnnnnnnnnnnnnnnnnnnnnnnnnnnnnnnnnnnnnnnnnnnnnnnnnnnnnnnnnnnnnnnnnnnnnnnnnnnnnnnnnnnnnnnnnnnnnnnnnnnnnnnnnnnnnnnnnnnnnnnnnnnnnnnnnnnnnnnnnnnnnnnnnnnnnnnnnnnnnnnnnnnnnnnnnnnnnnnnnnnnnnnnnnnnnnnnnnnnnnnnnnnnnnnnnnnnnnnnnnnnnnnnnnnnnnnnnnnnnnnnnnnnnnnnnnnnnnnnnnnnnnnnnnnnnnnnnnnnnnnnnnnnnnnnnnnnnnnnnnnnnnnnnnnnnnnnnnnnnnnnnnnnnnnnnnnnnnnnnnnnnnnnnnnnnnnnnnnnnnnnnnnnnnnnnnnnnnnnnnnnnnnnnnnnnnnnnnnnnnnnnnnnnnnnnnnnnnnnnnnnnnnnnnnnnnnnnnnnnnnnnnnnnnnnnnnnnnnnnnnnnnnnnnnnnnnnnnnnnnnnnnnnnnnnnnnnnnnnnnnnnnnnnnnnnnnnnnnnnnnnnnnnnnnnnnnnnnnnnnnnnnnnnnnnnnnnnnnnnnnnnnnnnnnnnnnnnnnnnnnnnnnnnnnnnnnnnnnnnnnnnnnnnnnnnnnnnnnnnnnnnnnnnnnnnnnnnnnnnnnnnnnnnnnnnnnnnnnnnnnnnnnnnnnnnnnnnnnnnnnnnnnnnnnnnnnnnnnnnnnnnnnnnnnnnnnnnnnnnnnnnnnnnnnnnnnnnnnnnnnnnnnnnnnnnnnnnnnnnnnnnnnnnnnnnnnnnnnnnnnnnnnnnnnnnnnnnnnnnnnnnnnnnnnnnnnnnnnnnnnnnnnnnnnnnnnnnnnnnnnnnnnnnnnnnnnnnnnnnnnnnnnnnnnnnnnnnnnnnnnnnnnnnnnnnnnnnnnnnnnnnnnnnnnnnnnnnnnnnnnnnnnnnnnnnnnnnnnnnnnnnnnnnnnnnnnnnnnnnnnnnnnnnnnnnnnnnnnnnnnnnnnnnnnnnnnnnnnnnnnnnnnnnnnnnnnnnnnnnnnnnnnnnnnnnnnnnnnnnnnnnnnnnnnnnnnnnnnnnnnnnnnnnnnnnnnnnnnnnnnnnnnnnnnnnnnnnnnnnnnnnnnnnnnnnnnnnnnnnnnnnnnnnnnnnnnnnnnnnnnnnnnnnnnnnnnnnnnnnnnnnnnnnnnnnnnnnnnnnnnnnnnnnnnnnnnnnnnnnnnnnnnnnnnnnnnnnnnnnnnnnnnnnnnnnnnnnnnnnnnnnnnnnnnnnnnnnnnnnnnnnnnnnnnnnnnnnnnnnnnnnnnnnnnnnnnnnnnnnnnnnnnnnnnnnnnnnnnnnnnnnnnnnnnnnnnnnnnnnnnnnnnnnnnnnnnnnnnnnnnnnnnnnnnnnnnnnnnnnnnnnnnnnnnnnnnnnnnnnnnnnnnnnnnnnnnnnnnnnnnnnnnnnnnnnnnnnnnnnnnnnnnnnnnnnnnnnnnnnnnnnnnnnnnnnnnnnnnnnnnnnnnnnnnnnnnnnnnnnnnnnnnnnnnnnnnnnnnnnnnnnnnnnnnnnnnnnnnnnnnnnnnnnnnnnnnnnnnnnnnnnnnnnnnnnnnnnnnnnnnnnnnnnnnnnnnnnnnnnnnnnnnnnnnnnnnnnnnnnnnnnnnnnnnnnnnnnnnnnnnnnnnnnnnnnnnnnnnnnnnnnnnnnnnnnnnnnnnnnnnnnnnnnnnnnnnnnnnnnnnnnnnnnnnnnnnnnnnnnnnnnnnnnnnnnnnnnnnnnnnnnnnnnnnnnnnnnnnnnnnnnnnnnnnnnnnnnnnnnnnnnnnnnnnnnnnnnnnnnnnnnnnnnnnnnnnnnnnnnnnnnnnnnnnnnnnnnnnnnnnnnnnnnnnnnnnnnnnnnnnnnnnnnnnnnnnnnnnnnnnnnnnnnnnnnnnnnnnnnnnnnnnnnnnnnnnnnnnnnnnnnnnnnnnnnnnnnnnnnnnnnnnnnnnnnnnnnnnnnnnnnnnnnnnnnnnnnnnnnnnnnnnnnnnnnnnnnnnnnnnnnnnnnnnnnnnnnnnnnnnnnnnnnnnnnnnnnnnnnnnnnnnnnnnnnnnnnnnnnnnnnnnnnnnnnnnnnnnnnnnnnnnnnnnnnnnnnnnnnnnnnnnnnnnnnnnnnnnnnnnnnnnnnnnnnnnnnnnnnnnnnnnnnnnnnnnnnnnnnnnnnnnnnnnnnnnnnnnnnnnnnnnnnnnnnnnnnnnnnnnnnnnnnnnnnnnnnnnnnnnnnnnnnnnnnnnnnnnnnnnnnnnnnnnnnnnnnnnnnnnnnnnnnnnnnnnnnnnnnnnnnnnnnnnnnnnnnnnnnnnnnnnnnnnnnnnnnnnnnnnnnnnnnnnnnnnnnnnnnnnnnnnnnnnnnnnnnnnnnnnnnnnnnnnnnnnnnnnnnnnnnnnnnnnnnnnnnnnnnnnnnnnnnnnnnnnnnnnnnnnnnnnnnnnnnnnnnnnnnnnnnnnnnnnnnnnnnnnnnnnnnnnnnnnnnnnnnnnnnnnnnnnnnnnnnnnnnnnnnnnnnnnnnnnnnnnnnnnnnnnnnnnnnnnnnnnnnnnnnnnnnnnnnnnnnnnnnnnnnnnnnnnnnnnnnnnnnnnnnnnnnnnnnnnnnnnnnnnnnnnnnnnnnnnnnnnnnnnnnnnnnnnnnnnnnnnnnnnnnnnnnnnnnnnnnnnnnnnnnnnnnnnnnnnnnnnnnnnnnnnnnnnnnnnnnnnnnnnnnnnnnnnnnnnnnnnnnnnnnnnnnnnnnnnnnnnnnnnnnnnnnnnnnnnnnnnnnnnnnnnnnnnnnnnnnnnnnnnnnnnnnnnnnnnnnnnnnnnnnnnnnnnnnnnnnnnnnnnnnnnnnnnnnnnnnnnnnnnnnnnnnnnnnnnnnnnnnnnnnnnnnnnnnnnnnnnnnnnnnnnnnnnnnnnnnnnnnnnnnnnnnnnnnnnnnnnnnnnnnnnnnnnnnnnnnnnnnnnnnnnnnnnnnnnnnnnnnnnnnnnnnnnnnnnnnnnnnnnnnnnnnnnnnnnnnnnnnnnnnnnnnnnnnnnnnnnnnnnnnnnnnnnnnnnnnnnnnnnnnnnnnnnnnnnnnnnnnnnnnnnnnnnnnnnnnnnnnnnnnnnnnnnnnnnnnnnnnnnnnnnnnnnnnnnnnnnnnnnnnnnnnnnnnnnnnnnnnnnnnnnnnnnnnnnnnnnnnnnnnnnnnnnnnnnnnnnnnnnnnnnnnnnnnnnnnnnnnnnnnnnnnnnnnnnnnnnnnnnnnnnnnnnnnnnnnnnnnnnnnnnnnnnnnnnnnnnnnnnnnnnnnnnnnnnnnnnnnnnnnnnnnnnnnnnnnnnnnnnnnnnnnnnnnnnnnnnnnnnnnnnnnnnnnnnnnnnnnnnnnnnnnnnnnnnnnnnnnnnnnnnnnnnnnnnnnnnnnnnnnnnnnnnnnnnnnnnnnnnnnnnnnnnnnnnnnnnnnnnnnnnnnnnnnnnnnnnnnnnnnnnnnnnnnnnnnnnnnnnnnnnnnnnnnnnnnnnnnnnnnnnnnnnnnnnnnnnnnnnnnnnnnnnnnnnnnnnnnnnnnnnnnnnnnnnnnnnnnnnnnnnnnnnnnnnnnnnnnnnnnnnnnnnnnnnnnnnnnnnnnnnnnnnnnnnnnnnnnnnnnnnnnnnnnnnnnnnnnnnnnnnnnnnnnnnnnnnnnnnnnnnnnnnnnnnnnnnnnnnnnnnnnnnnnnnnnnnnnnnnnnnnnnnnnnnnnnnnnnnnnnnnnnnnnnnnnnnnnnnnnnnnnnnnnnnnnnnnnnnnnnnnnnnnnnnnnnnnnnnnnnnnnnnnnnnnnnnnnnnnnnnnnnnnnnnnnnnnnnnnnnnnnnnnnnnnnnnnnnnnnnnnnnnnnnnnnnnnnnnnnnnnnnnnnnnnnnnnnnnnnnnnnnnnnnnnnnnnnnnnnnnnnnnnnnnnnnnnnnnnnnnnnnnnnnnnnnnnnnnnnnnnnnnnnnnnnnnnnnnnnnnnnnnnnnnnnnnnnnnnnnnnnnnnnnnnnnnnnnnnnnnnnnnnnnnnnnnnnnnnnnnnnnnnnnnnnnnnnnnnnnnnnnnnnnnnnnnnnnnnnnnnnnnnnnnnnnnnnnnnnnnnnnnnnnnnnnnnnnnnnnnnnnnnnnnnnnnnnnnnnnnnnnnnnnnnnnnnnnnnnnnnnnnnnnnnnnnnnnnnnnnnnnnnnnnnnnnnnnnnnnnnnnnnnnnnnnnnnnnnnnnnnnnnnnnnnnnnnnnnnnnnnnnnnnnnnnnnnnnnnnnnnnnnnnnnnnnnnnnnnnnnnnnnnnnnnnnnnnnnnnnnnnnnnnnnnnnnnnnnnnnnnnnnnnnnnnnnnnnnnnnnnnnnnnnnnnnnnnnnnnnnnnnnnnnnnnnnnnnnnnnnnnnnnnnnnnnnnnnnnnnnnnnnnnnnnnnnnnnnnnnnnnnnnnnnnnnnnnnnnnnnnnnnnnnnnnnnnnnnnnnnnnnnnnnnnnnnnnnnnnnnnnnnnnnnnnnnnnnnnnnnnnnnnnnnnnnnnnnnnnnnnnnnnnnnnnnnnnnnnnnnnnnnnnnnnnnnnnnnnnnnnnnnnnnnnnnnnnnnnnnnnnnnnnnnnnnnnnnnnnnnnnnnnnnnnnnnnnnnnnnnnnnnnnnnnnnnnnnnnnnnnnnnnnnnnnnnnnnnnnnnnnnnnnnnnnnnnnnnnnnnnnnnnnnnnnnnnnnnnnnnnnnnnnnnnnnnnnnnnnnnnnnnnnnnnnnnnnnnnnnnnnnnnnnnnnnnnnnnnnnnnnnnnnnnnnnnnnnnnnnnnnnnnnnnnnnnnnnnnnnnnnnnnnnnnnnnnnnnnnnnnnnnnnnnnnnnnnnnnnnnnnnnnnnnnnnnnnnnnnnnnnnnnnnnnnnnnnnnnnnnnnnnnnnnnnnnnnnnnnnnnnnnnnnnnnnnnnnnnnnnnnnnnnnnnnnnnnnnnnnnnnnnnnnnnnnnnnnnnnnnnnnnnnnnnnnnnnnnnnnnnnnnnnnnnnnnnnnnnnnnnnnnnnnnnnnnnnnnnnnnnnnnnnnnnnnnnnnnnnnnnnnnnnnnnnnnnnnnnnnnnnnnnnnnnnnnnnnnnnnnnnnnnnnnnnnnnnnnnnnnnnnnnnnnnnnnnnnnnnnnnnnnnnnnnnnnnnnnnnnnnnnnnnnnnnnnnnnnnnnnnnnnnnnnnnnnnnnnnnnnnnnnnnnnnnnnnnnnnnnnnnnnnnnnnnnnnnnnnnnnnnnnnnnnnnnnnnnnnnnnnnnnnnnnnnnnnnnnnnnnnnnnnnnnnnnnnnnnnnnnnnnnnnnnnnnnnnnnnnnnnnnnnnnnnnnnnnnnnnnnnnnnnnnnnnnnnnnnnnnnnnnnnnnnnnnnnnnnnnnnnnnnnnnnnnnnnnnnnnnnnnnnnnnnnnnnnnnnnnnnnnnnnnnnnnnnnnnnnnnnnnnnnnnnnnnnnnnnnnnnnnnnnnnnnnnnnnnnnnnnnnnnnnnnnnnnnnnnnnnnnnnnnnnnnnnnnnnnnnnnnnnnnnnnnnnnnnnnnnnnnnnnnnnnnnnnnnnnnnnnnnnnnnnnnnnnnnnnnnnnnnnnnnnnnnnnnnnnnnnnnnnnnnnnnnnnnnnnnnnnnnnnnnnnnnnnnnnnnnnnnnnnnnnnnnnnnnnnnnnnnnnnnnnnnnnnnnnnnnnnnnnnnnnnnnnnnnnnnnnnnnnnnnnnnnnnnnnnnnnnnnnnnnnnnnnnnnnnnnnnnnnnnnnnnnnnnnnnnnnnnnnnnnnnnnnnnnnnnnnnnnnnnnnnnnnnnnnnnnnnnnnnnnnnnnnnnnnnnnnnnnnnnnnnnnnnnnnnnnnnnnnnnnnnnnnnnnnnnnnnnnnnnnnnnnnnnnnnnnnnnnnnnnnnnnnnnnnnnnnnnnnnnnnnnnnnnnnnnnnnnnnnnnnnnnnnnnnnnnnnnnnnnnnnnnnnnnnnnnnnnnnnnnnnnnnnnnnnnnnnnnnnnnnnnnnnnnnnnnnnnnnnnnnnnnnnnnnnnnnnnnnnnnnnnnnnnnnnnnnnnnnnnnnnnnnnnnnnnnnnnnnnnnnnnnnnnnnnnnnnnnnnnnnnnnnnnnnnnnnnnnnnnnnnnnnnnnnnnnnnnnnnnnnnnnnnnnnnnnnnnnnnnnnnnnnnnnnnnnnnnnnnnnnnnnnnnnnnnnnnnnnnnnnnnnnnnnnnnnnnnnnnnnnnnnnnnnnnnnnnnnnnnnnnnnnnnnnnnnnnnnnnnnnnnnnnnnnnnnnnnnnnnnnnnnnnnnnnnnnnnnnnnnnnnnnnnnnnnnnnnnnnnnnnnnnnnnnnnnnnnnnnnnnnnnnnnnnnnnnnnnnnnnnnnnnnnnnnnnnnnnnnnnnnnnnnnnnnnnnnnnnnnnnnnnnnnnnnnnnnnnnnnnnnnnnnnnnnnnnnnnnnnnnnnnnnnnnnnnnnnnnnnnnnnnnnnnnnnnnnnnnnnnnnnnnnnnnnnnnnnnnnnnnnnnnnnnnnnnnnnnnnnnnnnnnnnnnnnnnnnnnnnnnnnnnnnnnnnnnnnnnnnnnnnnnnnnnnnnnnnnnnnnnnnnnnnnnnnnnnnnnnnnnnnnnnnnnnnnnnnnnnnnnnnnnnnnnnnnnnnnnnnnnnnnnnnnnnnnnnnnnnnnnnnnnnnnnnnnnnnnnnnnnnnnnnnnnnnnnnnnnnnnnnnnnnnnnnnnnnnnnnnnnnnnnnnnnnnnnnnnnnnnnnnnnnnnnnnnnnnnnnnnnnnnnnnnnnnnnnnnnnnnnnnnnnnnnnnnnnnnnnnnnnnnnnnnnnnnnnnnnnnnnnnnnnnnnnnnnnnnnnnnnnnnnnnnnnnnnnnnnnnnnnnnnnnnnnnnnnnnnnnnnnnnnnnnnnnnnnnnnnnnnnnnnnnnnnnnnnnnnnnnnnnnnnnnnnnnnnnnnnnnnnnnnnnnnnnnnnnnnnnnnnnnnnnnnnnnnnnnnnnnnnnnnnnnnnnnnnnnnnnnnnnnnnnnnnnnnnnnnnnnnnnnnnnnnnnnnnnnnnnnnnnnnnnnnnnnnnnnnnnnnnnnnnnnnnnnnnnnnnnnnnnnnnnnnnnnnnnnnnnnnnnnnnnnnnnnnnnnnnnnnnnnnnnnnnnnnnnnnnnnnnnnnnnnnnnnnnnnnnnnnnnnnnnnnnnnnnnnnnnnnnnnnnnnnnnnnnnnnnnnnnnnnnnnnnnnnnnnnnnnnnnnnnnnnnnnnnnnnnnnnnnnnnnnnnnnnnnnnnnnnnnnnnnnnnnnnnnnnnnnnnnnnnnnnnnnnnnnnnnnnnnnnnnnnnnnnnnnnnnnnnnnnnnnnnnnnnnnnnnnnnnnnnnnnnnnnnnnnnnnnnnnnnnnnnnnnnnnnnnnnnnnnnnnnnnnnnnnnnnnnnnnnnnnnnnnnnnnnnnnnnnnnnnnnnnnnnnnnnnnnnnnnnnnnnnnnnnnnnnnnnnnnnnnnnnnnnnnnnnnnnnnnnnnnnnnnnnnnnnnnnnnnnnnnnnnnnnnnnnnnnnnnnnnnnnnnnnnnnnnnnnnnnnnnnnnnnnnnnnnnnnnnnnnnnnnnnnnnnnnnnnnnnnnnnnnnnnnnnnnnnnnnnnnnnnnnnnnnnnnnnnnnnnnnnnnnnnnnnnnnnnnnnnnnnnnnnnnnnnnnnnnnnnnnnnnnnnnnnnnnnnnnnnnnnnnnnnnnnnnnnnnnnnnnnnnnnnnnnnnnnnnnnnnnnnnnnnnnnnnnnnnnnnnnnnnnnnnnnnnnnnnnnnnnnnnnnnnnnnnnnnnnnnnnnnnnnnnnnnnnnnnnnnnnnnnnnnnnnnnnnnnnnnnnnnnnnnnnnnnnnnnnnnnnnnnnnnnnnnnnnnnnnnnnnnnnnnnnnnnnnnnnnnnnnnnnnnnnnnnnnnnnnnnnnnnnnnnnnnnnnnnnnnnnnnnnnnnnnnnnnnnnnnnnnnnnnnnnnnnnnnnnnnnnnnnnnnnnnnnnnnnnnnnnnnnnnnnnnnnnnnnnnnnnnnnnnnnnnnnnnnnnnnnnnnnnnnnnnnnnnnnnnnnnnnnnnnnnnnnnnnnnnnnnnnnnnnnnnnnnnnnnnnnnnnnnnnnnnnnnnnnnnnnnnnnnnnnnnnnnnnnnnnnnnnnnnnnnnnnnnnnnnnnnnnnnnnnnnnnnnnnnnnnnnnnnnnnnnnnnnnnnnnnnnnnnnnnnnnnnnnnnnnnnnnnnnnnnnnnnnnnnnnnnnnnnnnnnnnnnnnnnnnnnnnnnnnnnnnnnnnnnnnnnnnnnnnnnnnnnnnnnnnnnnnnnnnnnnnnnnnnnnnnnnnnnnnnnnnnnnnnnnnnnnnnnnnnnnnnnnnnnnnnnnnnnnnnnnnnnnnnnnnnnnnnnnnnnnnnnnnnnnnnnnnnnnnnnnnnnnnnnnnnnnnnnnnnnnnnnnnnnnnnnnnnnnnnnnnnnnnnnnnnnnnnnnnnnnnnnnnnnnnnnnnnnnnnnnnnnnnnnnnnnnnnnnnnnnnnnnnnnnnnnnnnnnnnnnnnnnnnnnnnnnnnnnnnnnnnnnnnnnnnnnnnnnnnnnnnnnnnnnnnnnnnnnnnnnnnnnnnnnnnnnnnnnnnnnnnnnnnnnnnnnnnnnnnnnnnnnnnnnnnnnnnnnnnnnnnnnnnnnnnnnnnnnnnnnnnnnnnnnnnnnnnnnnnnnnnnnnnnnnnnnnnnnnnnnnnnnnnnnnnnnnnnnnnnnnnnnnnnnnnnnnnnnnnnnnnnnnnnnnnnnnnnnnnnnnnnnnnnnnnnnnnnnnnnnnnnnnnnnnnnnnnnnnnnnnnnnnnnnnnnnnnnnnnnnnnnnnnnnnnnnnnnnnnnnnnnnnnnnnnnnnnnnnnnnnnnnnnnnnnnnnnnnnnnnnnnnnnnnnnnnnnnnnnnnnnnnnnnnnnnnnnnnnnnnnnnnnnnnnnnnnnnnnnnnnnnnnnnnnnnnnnnnnnnnnnnnnnnnnnnnnnnnnnnnnnnnnnnnnnnnnnnnnnnnnnnnnnnnnnnnnnnnnnnnnnnnnnnnnnnnnnnnnnnnnnnnnnnnnnnnnnnnnnnnnnnnnnnnnnnnnnnnnnnnnnnnnnnnnnnnnnnnnnnnnnnnnnnnnnnnnnnnnnnnnnnnnnnnnnnnnnnnnnnnnnnnnnnnnnnnnnnnnnnnnnnnnnnnnnnnnnnnnnnnnnnnnnnnnnnnnnnnnnnnnnnnnnnnnnnnnnnnnnnnnnnnnnnnnnnnnnnnnnnnnnnnnnnnnnnnnnnnnnnnnnnnnnnnnnnnnnnnnnnnnnnnnnnnnnnnnnnnnnnnnnnnnnnnnnnnnnnnnnnnnnnnnnnnnnnnnnnnnnnnnnnnnnnnnnnnnnnnnnnnnnnnnnnnnnnnnnnnnnnnnnnnnnnnnnnnnnnnnnnnnnnnnnnnnnnnnnnnnnnnnnnnnnnnnnnnnnnnnnnnnnnnnnnnnnnnnnnnnnnnnnnnnnnnnnnnnnnnnnnnnnnnnnnnnnnnnnnnnnnnnnnnnnnnnnnnnnnnnnnnnnnnnnnnnnnnnnnnnnnnnnnnnnnnnnnnnnnnnnnnnnnnnnnnnnnnnnnnnnnnnnnnnnnnnnnnnnnnnnnnnnnnnnnnnnnnnnnnnnnnnnnnnnnnnnnnnnnnnnnnnnnnnnnnnnnnnnnnnnnnnnnnnnnnnnnnnnnnnnnnnnnnnnnnnnnnnnnnnnnnnnnnnnnnnnnnnnnnnnnnnnnnnnnnnnnnnnnnnnnnnnnnnnnnnnnnnnnnnnnnnnnnnnnnnnnnnnnnnnnnnnnnnnnnnnnnnnnnnnnnnnnnnnnnnnnnnnnnnnnnnnnnnnnnnnnnnnnnnnnnnnnnnnnnnnnnnnnnnnnnnnnnnnnnnnnnnnnnnnnnnnnnnnnnnnnnnnnnnnnnnnnnnnnnnnnnnnnnnnnnnnnnnnnnnnnnnnnnnnnnnnnnnnnnnnnnnnnnnnnnnnnnnnnnnnnnnnnnnnnnnnnnnnnnnnnnnnnnnnnnnnnnnnnnnnnnnnnnnnnnnnnnnnnnnnnnnnnnnnnnnnnnnnnnnnnnnnnnnnnnnnnnnnnnnnnnnnnnnnnnnnnnnnnnnnnnnnnnnnnnnnnnnnnnnnnnnnnnnnnnnnnnnnnnnnnnnnnnnnnnnnnnnnnnnnnnnnnnnnnnnnnnnnnnnnnnnnnnnnnnnnnnnnnnnnnnnnnnnnnnnnnnnnnnnnnnnnnnnnnnnnnnnnnnnnnnnnnnnnnnnnnnnnnnnnnnnnnnnnnnnnnnnnnnnnnnnnnnnnnnnnnnnnnnnnnnnnnnnnnnnnnnnnnnnnnnnnnnnnnnnnnnnnnnnnnnnnnnnnnnnnnnnnnnnnnnnnnnnnnnnnnnnnnnnnnnnnnnnnnnnnnnnnnnnnnnnnnnnnnnnnnnnnnnnnnnnnnnnnnnnnnnnnnnnnnnnnnnnnnnnnnnnnnnnnnnnnnnnnnnnnnnnnnnnnnnnnnnnnnnnnnnnnnnnnnnnnnnnnnnnnnnnnnnnnnnnnnnnnnnnnnnnnnnnnnnnnnnnnnnnnnnnnnnnnnnnnnnnnnnnnnnnnnnnnnnnnnnnnnnnnnnnnnnnnnnnnnnnnnnnnnnnnnnnnnnnnnnnnnnnnnnnnnnnnnnnnnnnnnnnnnnnnnnnnnnnnnnnnnnnnnnnnnnnnnnnnnnnnnnnnnnnnnnnnnnnnnnnnnnnnnnnnnnnnnnnnnnnnnnnnnnnnnnnnnnnnnnnnnnnnnnnnnnnnnnnnnnnnnnnnnnnnnnnnnnnnnnnnnnnnnnnnnnnnnnnnnnnnnnnnnnnnnnnnnnnnnnnnnnnnnnnnnnnnnnnnnnnnnnnnnnnnnnnnnnnnnnnnnnnnnnnnnnnnnnnnnnnnnnnnnnnnnnnnnnnnnnnnnnnnnnnnnnnnnnnnnnnnnnnnnnnnnnnnnnnnnnnnnnnnnnnnnnnnnnnnnnnnnnnnnnnnnnnnnnnnnnnnnnnnnnnnnnnnnnnnnnnnnnnnnnnnnnnnnnnnnnnnnnnnnnnnnnnnnnnnnnnnnnnnnnnnnnnnnnnnnnnnnnnnnnnnnnnnnnnnnnnnnnnnnnnnnnnnnnnnnnnnnnnnnnnnnnnnnnnnnnnnnnnnnnnnnnnnnnnnnnnnnnnnnnnnnnnnnnnnnnnnnnnnnnnnnnnnnnnnnnnnnnnnnnnnnnnnnnnnnnnnnnnnnnnnnnnnnnnnnnnnnnnnnnnnnnnnnnnnnnnnnnnnnnnnnnnnnnnnnnnnnnnnnnnnnnnnnnnnnnnnnnnnnnnnnnnnnnnnnnnnnnnnnnnnnnnnnnnnnnnnnnnnnnnnnnnnnnnnnnnnnnnnnnnnnnnnnnnnnnnnnnnnnnnnnnnnnnnnnnnnnnnnnnnnnnnnnnnnnnnnnnnnnnnnnnnnnnnnnnnnnnnnnnnnnnnnnnnnnnnnnnnnnnnnnnnnnnnnnnnnnnnnnnnnnnnnnnnnnnnnnnnnnnnnnnnnnnnnnnnnnnnnnnnnnnnnnnnnnnnnnnnnnnnnnnnnnnnnnnnnnnnnnnnnnnnnnnnnnnnnnnnnnnnnnnnnnnnnnnnnnnnnnnnnnnnnnnnnnnnnnnnnnnnnnnnnnnnnnnnnnnnnnnnnnnnnnnnnnnnnnnnnnnnnnnnnnnnnnnnnnnnnnnnnnnnnnnnnnnnnnnnnnnnnnnnnnnnnnnnnnnnnnnnnnnnnnnnnnnnnnnnnnnnnnnnnnnnnnnnnnnnnnnnnnnnnnnnnnnnnnnnnnnnnnnnnnnnnnnnnnnnnnnnnnnnnnnnnnnnnnnnnnnnnnnnnnnnnnnnnnnnnnnnnnnnnnnnnnnnnnnnnnnnnnnnnnnnnnnnnnnnnnnnnnnnnnnnnnnnnnnnnnnnnnnnnnnnnnnnnnnnnnnnnnnnnnnnnnnnnnnnnnnnnnnnnnnnnnnnnnnnnnnnnnnnnnnnnnnnnnnnnnnnnnnnnnnnnnnnnnnnnnnnnnnnnnnnnnnnnnnnnnnnnnnnnnnnnnnnnnnnnnnnnnnnnnnnnnnnnnnnnnnnnnnnnnnnnnnnnnnnnnnnnnnnnnnnnnnnnnnnnnnnnnnnnnnnnnnnnnnnnnnnnnnnnnnnnnnnnnnnnnnnnnnnnnnnnnnnnnnnnnnnnnnnnnnnnnnnnnnnnnnnnnnnnnnnnnnnnnnnnnnnnnnnnnnnnnnnnnnnnnnnnnnnnnnnnnnnnnnnnnnnnnnnnnnnnnnnnnnnnnnnnnnnnnnnnnnnnnnnnnnnnnnnnnnnnnnnnnnnnnnnnnnnnnnnnnnnnnnnnnnnnnnnnnnnnnnnnnnnnnnnnnnnnnnnnnnnnnnnnnnnnnnnnnnnnnnnnnnnnnnnnnnnnnnnnnnnnnnnnnnnnnnnnnnnnnnnnnnnnnnnnnnnnnnnnnnnnnnnnnnnnnnnnnnnnnnnnnnnnnnnnnnnnnnnnnnnnnnnnnnnnnnnnnnnnnnnnnnnnnnnnnnnnnnnnnnnnnnnnnnnnnnnnnnnnnnnnnnnnnnnnnnnnnnnnnnnnnnnnnnnnnnnnnnnnnnnnnnnnnnnnnnnnnnnnnnnnnnnnnnnnnnnnnnnnnnnnnnnnnnnnnnnnnnnnnnnnnnnnnnnnnnnnnnnnnnnnnnnnnnnnnnnnnnnnnnnnnnnnnnnnnnnnnnnnnnnnnnnnnnnnnnnnnnnnnnnnnnnnnnnnnnnnnnnnnnnnnnnnnnnnnnnnnnnnnnnnnnnnnnnnnnnnnnnnnnnnnnnnnnnnnnnnnnnnnnnnnnnnnnnnnnnnnnnnnnnnnnnnnnnnnnnnnnnnnnnnnnnnnnnnnnnnnnnnnnnnnnnnnnnnnnnnnnnnnnnnnnnnnnnnnnnnnnnnnnnnnnnnnnnnnnnnnnnnnnnnnnnnnnnnnnnnnnnnnnnnnnnnnnnnnnnnnnnnnnnnnnnnnnnnnnnnnnnnnnnnnnnnnnnnnnnnnnnnnnnnnnnnnnnnnnnnnnnnnnnnnnnnnnnnnnnnnnnnnnnnnnnnnnnnnnnnnnnnnnnnnnnnnnnnnnnnnnnnnnnnnnnnnnnnnnnnnnnnnnnnnnnnnnnnnnnnnnnnnnnnnnnnnnnnnnnnnnnnnnnnnnnnnnnnnnnnnnnnnnnnnnnnnnnnnnnnnnnnnnnnnnnnnnnnnnnnnnnnnnnnnnnnnnnnnnnnnnnnnnnnnnnnnnnnnnnnnnnnnnnnnnnnnnnnnnnnnnnnnnnnnnnnnnnnnnnnnnnnnnnnnnnnnnnnnnnnnnnnnnnnnnnnnnnnnnnnnnnnnnnnnnnnnnnnnnnnnnnnnnnnnnnnnnnnnnnnnnnnnnnnnnnnnnnnnnnnnnnnnnnnnnnnnnnnnnnnnnnnnnnnnnnnnnnnnnnnnnnnnnnnnnnnnnnnnnnnnnnnnnnnnnnnnnnnnnnnnnnnnnnnnnnnnnnnnnnnnnnnnnnnnnnnnnnnnnnnnnnnnnnnnnnnnnnnnnnnnnnnnnnnnnnnnnnnnnnnnnnnnnnnnnnnnnnnnnnnnnnnnnnnnnnnnnnnnnnnnnnnnnnnnnnnnnnnnnnnnnnnnnnnnnnnnnnnnnnnnnnnnnnnnnnnnnnnnnnnnnnnnnnnnnnnnnnnnnnnnnnnnnnnnnnnnnnnnnnnnnnnnnnnnnnnnnnnnnnnnnnnnnnnnnnnnnnnnnnnnnnnnnnnnnnnnnnnnnnnnnnnnnnnnnnnnnnnnnnnnnnnnnnnnnnnnnnnnnnnnnnnnnnnnnnnnnnnnnnnnnnnnnnnnnnnnnnnnnnnnnnnnnnnnnnnnnnnnnnnnnnnnnnnnnnnnnnnnnnnnnnnnnnnnnnnnnnnnnnnnnnnnnnnnnnnnnnnnnnnnnnnnnnnnnnnnnnnnnnnnnnnnnnnnnnnnnnnnnnnnnnnnnnnnnnnnnnnnnnnnnnnnnnnnnnnnnnnnnnnnnnnnnnnnnnnnnnnnnnnnnnnnnnnnnnnnnnnnnnnnnnnnnnnnnnnnnnnnnnnnnnnnnnnnnnnnnnnnnnnnnnnnnnnnnnnnnnnnnnnnnnnnnnnnnnnnnnnnnnnnnnnnnnnnnnnnnnnnnnnnnnnnnnnnnnnnnnnnnnnnnnnnnnnnnnnnnnnnnnnnnnnnnnnnnnnnnnnnnnnnnnnnnnnnnnnnnnnnnnnnnnnnnnnnnnnnnnnnnnnnnnnnnnnnnnnnnnnnnnnnnnnnnnnnnnnnnnnnnnnnnnnnnnnnnnnnnnnnnnnnnnnnnnnnnnnnnnnnnnnnnnnnnnnnnnnnnnnnnnnnnnnnnnnnnnnnnnnnnnnnnnnnnnnnnnnnnnnnnnnnnnnnnnnnnnnnnnnnnnnnnnnnnnnnnnnnnnnnnnnnnnnnnnnnnnnnnnnnnnnnnnnnnnnnnnnnnnnnnnnnnnnnnnnnnnnnnnnnnnnnnnnnnnnnnnnnnnnnnnnnnnnnnnnnnnnnnnnnnnnnnnnnnnnnnnnnnnnnnnnnnnnnnnnnnnnnnnnnnnnnnnnnnnnnnnnnnnnnnnnnnnnnnnnnnnnnnnnnnnnnnnnnnnnnnnnnnnnnnnnnnnnnnnnnnnnnnnnnnnnnnnnnnnnnnnnnnnnnnnnnnnnnnnnnnnnnnnnnnnnnnnnnnnnnnnnnnnnnnnnnnnnnnnnnnnnnnnnnnnnnnnnnnnnnnnnnnnnnnnnnnnnnnnnnnnnnnnnnnnnnnnnnnnnnnnnnnnnnnnnnnnnnnnnnnnnnnnnnnnnnnnnnnnnnnnnnnnnnnnnnnnnnnnnnnnnnnnnnnnnnnnnnnnnnnnnnnnnnnnnnnnnnnnnnnnnnnnnnnnnnnnnnnnnnnnnnnnnnnnnnnnnnnnnnnnnnnnnnnnnnnnnnnnnnnnnnnnnnnnnnnnnnnnnnnnnnnnnnnnnnnnnnnnnnnnnnnnnnnnnnnnnnnnnnnnnnnnnnnnnnnnnnnnnnnnnnnnnnnnnnnnnnnnnnnnnnnnnnnnnnnnnnnnnnnnnnnnnnnnnnnnnnnnnnnnnnnnnnnnnnnnnnnnnnnnnnnnnnnnnnnnnnnnnnnnnnnnnnnnnnnnnnnnnnnnnnnnnnnnnnnnnnnnnnnnnnnnnnnnnnnnnnnnnnnnnnnnnnnnnnnnnnnnnnnnnnnnnnnnnnnnnnnnnnnnnnnnnnnnnnnnnnnnnnnnnnnnnnnnnnnnnnnnnnnnnnnnnnnnnnnnnnnnnnnnnnnnnnnnnnnnnnnnnnnnnnnnnnnnnnnnnnnnnnnnnnnnnnnnnnnnnnnnnnnnnnnnnnnnnnnnnnnnnnnnnnnnnnnnnnnnnnnnnnnnnnnnnnnnnnnnnnnnnnnnnnnnnnnnnnnnnnnnnnnnnnnnnnnnnnnnnnnnnnnnnnnnnnnnnnnnnnnnnnnnnnnnnnnnnnnnnnnnnnnnnnnnnnnnnnnnnnnnnnnnnnnnnnnnnnnnnnnnnnnnnnnnnnnnnnnnnnnnnnnnnnnnnnnnnnnnnnnnnnnnnnnnnnnnnnnnnnnnnnnnnnnnnnnnnnnnnnnnnnnnnnnnnnnnnnnnnnnnnnnnnnnnnnnnnnnnnnnnnnnnnnnnnnnnnnnnnnnnnnnnnnnnnnnnnnnnnnnnnnnnnnnnnnnnnnnnnnnnnnnnnnnnnnnnnnnnnnnnnnnnnnnnnnnnnnnnnnnnnnnnnnnnnnnnnnnnnnnnnnnnnnnnnnnnnnnnnnnnnnnnnnnnnnnnnnnnnnnnnnnnnnnnnnnnnnnnnnnnnnnnnnnnnnnnnnnnnnnnnnnnnnnnnnnnnnnnnnnnnnnnnnnnnnnnnnnnnnnnnnnnnnnnnnnnnnnnnnnnnnnnnnnnnnnnnnnnnnnnnnnnnnnnnnnnnnnnnnnnnnnnnnnnnnnnnnnnnnnnnnnnnnnnnnnnnnnnnnnnnnnnnnnnnnnnnnnnnnnnnnnnnnnnnnnnnnnnnnnnnnnnnnnnnnnnnnnnnnnnnnnnnnnnnnnnnnnnnnnnnnnnnnnnnnnnnnnnnnnnnnnnnnnnnnnnnnnnnnnnnnnnnnnnnnnnnnnnnnnnnnnnnnnnnnnnnnnnnnnnnnnnnnnnnnnnnnnnnnnnnnnnnnnnnnnnnnnnnnnnnnnnnnnnnnnnnnnnnnnnnnnnnnnnnnnnnnnnnnnnnnnnnnnnnnnnnnnnnnnnnnnnnnnnnnnnnnnnnnnnnnnnnnnnnnnnnnnnnnnnnnnnnnnnnnnnnnnnnnnnnnnnnnnnnnnnnnnnnnnnnnnnnnnnnnnnnnnnnnnnnnnnnnnnnnnnnnnnnnnnnnnnnnnnnnnnnnnnnnnnnnnnnnnnnnnnnnnnnnnnnnnnnnnnnnnnnnnnnnnnnnnnnnnnnnnnnnnnnnnnnnnnnnnnnnnnnnnnnnnnnnnnnnnnnnnnnnnnnnnnnnnnnnnnnnnnnnnnnnnnnnnnnnnnnnnnnnnnnnnnnnnnnnnnnnnnnnnnnnnnnnnnnnnnnnnnnnnnnnnnnnnnnnnnnnnnnnnnnnnnnnnnnnnnnnnnnnnnnnnnnnnnnnnnnnnnnnnnnnnnnnnnnnnnnnnnnnnnnnnnnnnnnnnnnnnnnnnnnnnnnnnnnnnnnnnnnnnnnnnnnnnnnnnnnnnnnnnnnnnnnnnnnnnnnnnnnnnnnnnnnnnnnnnnnnnnnnnnnnnnnnnnnnnnnnnnnnnnnnnnnnnnnnnnnnnnnnnnnnnnnnnnnnnnnnnnnnnnnnnnnnnnnnnnnnnnnnnnnnnnnnnnnnnnnnnnnnnnnnnnnnnnnnnnnnnnnnnnnnnnnnnnnnnnnnnnnnnnnnnnnnnnnnnnnnnnnnnnnnnnnnnnnnnnnnnnnnnnnnnnnnnnnnnnnnnnnnnnnnnnnnnnnnnnnnnnnnnnnnnnnnnnnnnnnnnnnnnnnnnnnnnnnnnnnnnnnnnnnnnnnnnnnnnnnnnnnnnnnnnnnnnnnnnnnnnnnnnnnnnnnnnnnnnnnnnnnnnnnnnnnnnnnnnnnnnnnnnnnnnnnnnnnnnnnnnnnnnnnnnnnnnnnnnnnnnnnnnnnnnnnnnnnnnnnnnnnnnnnnnnnnnnnnnnnnnnnnnnnnnnnnnnnnnnnnnnnnnnnnnnnnnnnnnnnnnnnnnnnnnnnnnnnnnnnnnnnnnnnnnnnnnnnnnnnnnnnnnnnnnnnnnnnnnnnnnnnnnnnnnnnnnnnnnnnnnnnnnnnnnnnnnnnnnnnnnnnnnnnnnnnnnnnnnnnnnnnnnnnnnnnnnnnnnnnnnnnnnnnnnnnnnnnnnnnnnnnnnnnnnnnnnnnnnnnnnnnnnnnnnnnnnnnnnnnnnnnnnnnnnnnnnnnnnnnnnnnnnnnnnnnnnnnnnnnnnnnnnnnnnnnnnnnnnnnnnnnnnnnnnnnnnnnnnnnnnnnnnnnnnnnnnnnnnnnnnnnnnnnnnnnnnnnnnnnnnnnnnnnnnnnnnnnnnnnnnnnnnnnnnnnnnnnnnnnnnnnnnnnnnnnnnnnnnnnnnnnnnnnnnnnnnnnnnnnnnnnnnnnnnnnnnnnnnnnnnnnnnnnnnnnnnnnnnnnnnnnnnnnnnnnnnnnnnnnnnnnnnnnnnnnnnnnnnnnnnnnnnnnnnnnnnnnnnnnnnnnnnnnnnnnnnnnnnnnnnnnnnnnnnnnnnnnnnnnnnnnnnnnnnnnnnnnnnnnnnnnnnnnnnnnnnnnnnnnnnnnnnnnnnnnnnnnnnnnnnnnnnnnnnnnnnnnnnnnnnnnnnnnnnnnnnnnnnnnnnnnnnnnnnnnnnnnnnnnnnnnnnnnnnnnnnnnnnnnnnnnnnnnnnnnnnnnnnnnnnnnnnnnnnnnnnnnnnnnnnnnnnnnnnnnnnnnnnnnnnnnnnnnnnnnnnnnnnnnnnnnnnnnnnnnnnnnnnnnnnnnnnnnnnnnnnnnnnnnnnnnnnnnnnnnnnnnnnnnnnnnnnnnnnnnnnnnnnnnnnnnnnnnnnnnnnnnnnnnnnnnnnnnnnnnnnnnnnnnnnnnnnnnnnnnnnnnnnnnnnnnnnnnnnnnnnnnnnnnnnnnnnnnnnnnnnnnnnnnnnnnnnnnnnnnnnnnnnnnnnnnnnnnnnnnnnnnnnnnnnnnnnnnnnnnnnnnnnnnnnnnnnnnnnnnnnnnnnnnnnnnnnnnnnnnnnnnnnnnnnnnnnnnnnnnnnnnnnnnnnnnnnnnnnnnnnnnnnnnnnnnnnnnnnnnnnnnnnnnnnnnnnnnnnnnnnnnnnnnnnnnnnnnnnnnnnnnnnnnnnnnnnnnnnnnnnnnnnnnnnnnnnnnnnnnnnnnnnnnnnnnnnnnnnnnnnnnnnnnnnnnnnnnnnnnnnnnnnnnnnnnnnnnnnnnnnnnnnnnnnnnnnnnnnnnnnnnnnnnnnnnnnnnnnnnnnnnnnnnnnnnnnnnnnnnnnnnnnnnnnnnnnnnnnnnnnnnnnnnnnnnnnnnnnnnnnnnnnnnnnnnnnnnnnnnnnnnnnnnnnnnnnnnnnnnnnnnnnnnnnnnnnnnnnnnnnnnnnnnnnnnnnnnnnnnnnnnnnnnnnnnnnnnnnnnnnnnnnnnnnnnnnnnnnnnnnnnnnnnnnnnnnnnnnnnnnnnnnnnnnnnnnnnnnnnnnnnnnnnnnnnnnnnnnnnnnnnnnnnnnnnnnnnnnnnnnnnnnnnnnnnnnnnnnnnnnnnnnnnnnnnnnnnnnnnnnnnnnnnnnnnnnnnnnnnnnnnnnnnnnnnnnnnnnnnnnnnnnnnnnnnnnnnnnnnnnnnnnnnnnnnnnnnnnnnnnnnnnnnnnnnnnnnnnnnnnnnnnnnnnnnnnnnnnnnnnnnnnnnnnnnnnnnnnnnnnnnnnnnnnnnnnnnnnnnnnnnnnnnnnnnnnnnnnnnnnnnnnnnnnnnnnnnnnnnnnnnnnnnnnnnnnnnnnnnnnnnnnnnnnnnnnnnnnnnnnnnnnnnnnnnnnnnnnnnnnnnnnnnnnnnnnnnnnnnnnnnnnnnnnnnnnnnnnnnnnnnnnnnnnnnnnnnnnnnnnnnnnnnnnnnnnnnnnnnnnnnnnnnnnnnnnnnnnnnnnnnnnnnnnnnnnnnnnnnnnnnnnnnnnnnnnnnnnnnnnnnnnnnnnnnnnnnnnnnnnnnnnnnnnnnnnnnnnnnnnnnnnnnnnnnnnnnnnnnnnnnnnnnnnnnnnnnnnnnnnnnnnnnnnnnnnnnnnnnnnnnnnnnnnnnnnnnnnnnnnnnnnnnnnnnnnnnnnnnnnnnnnnnnnnnnnnnnnnnnnnnnnnnnnnnnnnnnnnnnnnnnnnnnnnnnnnnnnnnnnnnnnnnnnnnnnnnnnnnnnnnnnnnnnnnnnnnnnnnnnnnnnnnnnnnnnnnnnnnnnnnnnnnnnnnnnnnnnnnnnnnnnnnnnnnnnnnnnnnnnnnnnnnnnnnnnnnnnnnnnnnnnnnnnnnnnnnnnnnnnnnnnnnnnnnnnnnnnnnnnnnnnnnnnnnnnnnnnnnnnnnnnnnnnnnnnnnnnnnnnnnnnnnnnnnnnnnnnnnnnnnnnnnnnnnnnnnnnnnnnnnnnnnnnnnnnnnnnnnnnnnnnnnnnnnnnnnnnnnnnnnnnnnnnnnnnnnnnnnnnnnnnnnnnnnnnnnnnnnnnnnnnnnnnnnnnnnnnnnnnnnnnnnnnnnnnnnnnnnnnnnnnnnnnnnnnnnnnnnnnnnnnnnnnnnnnnnnnnnnnnnnnnnnnnnnnnnnnnnnnnnnnnnnnnnnnnnnnnnnnnnnnnnnnnnnnnnnnnnnnnnnnnnnnnnnnnnnnnnnnnnnnnnnnnnnnnnnnnnnnnnnnnnnnnnnnnnnnnnnnnnnnnnnnnnnnnnnnnnnnnnnnnnnnnnnnnnnnnnnnnnnnnnnnnnnnnnnnnnnnnnnnnnnnnnnnnnnnnnnnnnnnnnnnnnnnnnnnnnnnnnnnnnnnnnnnnnnnnnnnnnnnnnnnnnnnnnnnnnnnnnnnnnnnnnnnnnnnnnnnnnnnnnnnnnnnnnnnnnnnnnnnnnnnnnnnnnnnnnnnnnnnnnnnnnnnnnnnnnnnnnnnnnnnnnnnnnnnnnnnnnnnnnnnnnnnnnnnnnnnnnnnnnnnnnnnnnnnnnnnnnnnnnnnnnnnnnnnnnnnnnnnnnnnnnnnnnnnnnnnnnnnnnnnnnnnnnnnnnnnnnnnnnnnnnnnnnnnnnnnnnnnnnnnnnnnnnnnnnnnnnnnnnnnnnnnnnnnnnnnnnnnnnnnnnnnnnnnnnnnnnnnnnnnnnnnnnnnnnnnnnnnnnnnnnnnnnnnnnnnnnnnnnnnnnnnnnnnnnnnnnnnnnnnnnnnnnnnnnnnnnnnnnnnnnnnnnnnnnnnnnnnnnnnnnnnnnnnnnnnnnnnnnnnnnnnnnnnnnnnnnnnnnnnnnnnnnnnnnnnnnnnnnnnnnnnnnnnnnnnnnnnnnnnnnnnnnnnnnnnnnnnnnnnnnnnnnnnnnnnnnnnnnnnnnnnnnnnnnnnnnnnnnnnnnnnnnnnnnnnnnnnnnnnnnnnnnnnnnnnnnnnnnnnnnnnnnnnnnnnnnnnnnnnnnnnnnnnnnnnnnnnnnnnnnnnnnnnnnnnnnnnnnnnnnnnnnnnnnnnnnnnnnnnnnnnnnnnnnnnnnnnnnnnnnnnnnnnnnnnnnnnnnnnnnnnnnnnnnnnnnnnnnnnnnnnnnnnnnnnnnnnnnnnnnnnnnnnnnnnnnnnnnnnnnnnnnnnnnnnnnnnnnnnnnnnnnnnnnnnnnnnnnnnnnnnnnnnnnnnnnnnnnnnnnnnnnnnnnnnnnnnnnnnnnnnnnnnnnnnnnnnnnnnnnnnnnnnnnnnnnnnnnnnnnnnnnnnnnnnnnnnnnnnnnnnnnnnnnnnnnnnnnnnnnnnnnnnnnnnnnnnnnnnnnnnnnnnnnnnnnnnnnnnnnnnnnnnnnnnnnnnnnnnnnnnnnnnnnnnnnnnnnnnnnnnnnnnnnnnnnnnnnnnnnnnnnnnnnnnnnnnnnnnnnnnnnnnnnnnnnnnnnnnnnnnnnnnnnnnnnnnnnnnnnnnnnnnnnnnnnnnnnnnnnnnnnnnnnnnnnnnnnnnnnnnnnnnnnnnnnnnnnnnnnnnnnnnnnnnnnnnnnnnnnnnnnnnnnnnnnnnnnnnnnnnnnnnnnnnnnnnnnnnnnnnnnnnnnnnnnnnnnnnnnnnnnnnnnnnnnnnnnnnnnnnnnnnnnnnnnnnnnnnnnnnnnnnnnnnnnnnnnnnnnnnnnnnnnnnnnnnnnnnnnnnnnnnnnnnnnnnnnnnnnnnnnnnnnnnnnnnnnnnnnnnnnnnnnnnnnnnnnnnnnnnnnnnnnnnnnnnnnnnnnnnnnnnnnnnnnnnnnnnnnnnnnnnnnnnnnnnnnnnnnnnnnnnnnnnnnnnnnnnnnnnnnnnnnnnnnnnnnnnnnnnnnnnnnnnnnnnnnnnnnnnnnnnnnnnnnnnnnnnnnnnnnnnnnnnnnnnnnnnnnnnnnnnnnnnnnnnnnnnnnnnnnnnnnnnnnnnnnnnnnnnnnnnnnnnnnnnnnnnnnnnnnnnnnnnnnnnnnnnnnnnnnnnnnnnnnnnnnnnnnnnnnnnnnnnnnnnnnnnnnnnnnnnnnnnnnnnnnnnnnnnnnnnnnnnnnnnnnnnnnnnnnnnnnnnnnnnnnnnnnnnnnnnnnnnnnnnnnnnnnnnnnnnnnnnnnnnnnnnnnnnnnnnnnnnnnnnnnnnnnnnnnnnnnnnnnnnnnnnnnnnnnnnnnnnnnnnnnnnnnnnnnnnnnnnnnnnnnnnnnnnnnnnnnnnnnnnnnnnnnnnnnnnnnnnnnnnnnnnnnnnnnnnnnnnnnnnnnnnnnnnnnnnnnnnnnnnnnnnnnnnnnnnnnnnnnnnnnnnnnnnnnnnnnnnnnnnnnnnnnnnnnnnnnnnnnnnnnnnnnnnnnnnnnnnnnnnnnnnnnnnnnnnnnnnnnnnnnnnnnnnnnnnnnnnnnnnnnnnnnnnnnnnnnnnnnnnnnnnnnnnnnnnnnnnnnnnnnnnnnnnnnnnnnnnnnnnnnnnnnnnnnnnnnnnnnnnnnnnnnnnnnnnnnnnnnnnnnnnnnnnnnnnnnnnnnnnnnnnnnnnnnnnnnnnnnnnnnnnnnnnnnnnnnnnnnnnnnnnnnnnnnnnnnnnnnnnnnnnnnnnnnnnnnnnnnnnnnnnnnnnnnnnnnnnnnnnnnnnnnnnnnnnnnnnnnnnnnnnnnnnnnnnnnnnnnnnnnnnnnnnnnnnnnnnnnnnnnnnnnnnnnnnnnnnnnnnnnnnnnnnnnnnnnnnnnnnnnnnnnnnnnnnnnnnnnnnnnnnnnnnnnnnnnnnnnnnnnnnnnnnnnnnnnnnnnnnnnnnnnnnnnnnnnnnnnnnnnnnnnnnnnnnnnnnnnnnnnnnnnnnnnnnnnnnnnnnnnnnnnnnnnnnnnnnnnnnnnnnnnnnnnnnnnnnnnnnnnnnnnnnnnnnnnnnnnnnnnnnnnnnnnnnnnnnnnnnnnnnnnnnnnnnnnnnnnnnnnnnnnnnnnnnnnnnnnnnnnnnnnnnnnnnnnnnnnnnnnnnnnnnnnnnnnnnnnnnnnnnnnnnnnnnnnnnnnnnnnnnnnnnnnnnnnnnnnnnnnnnnnnnnnnnnnnnnnnnnnnnnnnnnnnnnnnnnnnnnnnnnnnnnnnnnnnnnnnnnnnnnnnnnnnnnnnnnnnnnnnnnnnnnnnnnnnnnnnnnnnnnnnnnnnnnnnnnnnnnnnnnnnnnnnnnnnnnnnnnnnnnnnnnnnnnnnnnnnnnnnnnnnnnnnnnnnnnnnnnnngccggaagtgcggtcagaggctaatatatcatagctgtatagctaagacaagaaaatttcttaatttttcgattttcttgattttttcacagcttctttttgtcgggatgtatgcgccacagggacgatatattgttggggtgggttctacgacatgaacatctggagccccaagaagcgagacgagaaattgaatcacaggcgcgacaatcccgtcaaacgagtgctggtcaagcacccgggcgactggccgtggtcgcgctgcggcgggaggttctatttctggaatgatggttcgatcttgagcatggacaagaggctatgaaggtgtcgacatgccgaggggcgcatacatcccgacaaaaacccgtcgggacgtatgcgccacccgcgaaatcgatcgcaagattccctccgaatcggaacgccgcggaggcatcaaagcttctgcgcttagtcaacggcgcgccttgcagcctgtgaagtgtgggctaagcggacgcgataaccgttgtcgtggtcttcgggccttgcctttgccgcgtcccgggtgtataccttcgccatgattgtcctgtggtagctacgcagcggacggtccggtccccccggggcgcgacgggcctgccacccgcctcttgcccaggcaaggaggaagccgtggagtacaacctgctcgaagaaaagtggattcccgttctgtggaaagatgggcacagcggtcgcgtgggcattagtgaggcccttaggcaagcaggccggattcgccaaatcgcggccagcaacccaatggaccgcctggccatcctgcgtttcctgcttgcgttgctctattggtgcaaagggaatcccccggacgacaagaactcgatttcttcgtttccctctgattggttcaagaaactcgatgacaacaaagactgtttcaaccttcagggcgatgggaagcggttttaccaacgcaagcctaaccgacttgagaagaagctgtccgtcaactatctgatgcaagaagtgccgaccggcacaaacttctggcacttccggcatgggacagatttcagaaacggcttatgtccggcatgctgcgcaatgggcttgttgcgccttccgctctttgctacgtcggccgggcgcggcaagcccccgggcgtcaatcaaaaaccgccgatctacatcgtgccgatgggcgactgcctttccgaaaccctgcgcctctcatggcggaagacgtcggagatgaacctgggcacgcccacatgggaaaatccggacataagcctccctcaacacggcaatgttccattattgataggattaacgtgggtaccgcggcgcgtctggttagacactccggagacaccagagtccaactgcatcgcctgcgggcgcagggaggctctgatacgtcaatgtgtctttgcgggtattgggagcacaaagacaggcgaaggcagtctggcacgaatctggaacgacccgcacaccatcagcgaaggcgacgagattgtgaagcctttcagcgcgcttggcccggccgacgctgcggctgggaagtggacgaaggtcgtggcgggaatcctgtgcggggaaaagccgaaggggaacagtaagttgtgggtcgtcagctttgcgacagtgcagaacgacaaatacctggaagcagccgagcgggagattcaattcttggccgcgctcgacgacgtgaaggttcaggcgagtttgcaagaaatccaggcgtggcagaaggaaggctggaagctcgttggcagagccaaaccgcgagagacttcacgaaacagaggacaccttgaaattctctccgcagtcgccgctgttcgtccccaagccgaggcaacggtttccggaaaaatcgacgagatgatcgcagaaggcggtaaggcatgggaagaggcggcccaggaatatcgtccgttgatggccgccgtcgccaaatcgctttccccgggctacacaaccgcttccctccggaggcgacaagaaattgccgctgtaaagccggacatgcggccaaagagaaacaacaaagacgaagggggggacaagtgactccaacggagcagtacgtcgaagttctgactcgactgaaacccggtgagctcgggctcttgcgcaaccatgccgggcaagggctcgacgaatcggtagagggctttgaccttttcgcaggcctttggtggccgctgcgggcgcaaacccaacgggcgcctcgccgtgaggtggcctggcttgtcgccaaactctacgccctccggcccctcgagcattcaccccgcgagaccctcgctcgccagctcgggcgatcccggccgggcgagaaaacagcgcggcagcgtttcgagcaacgcttcgacaggatgctcacgctgccgcttgctgaaatcgaacccgccctacagtgggcaatcgacctcatagcttccaagcacctcgaactcgactgggtgcggctgacgaacgatctttccatctgggaacgcgaatccacccggctcaaatgggccgaggaatttttgaactgtccaagaggaggagagtcatgttgatccagattcacgccattcagaatcacagcccggccaacctgaaccgggatgacctgggcgcgcccaagacttgcttttttggcggagtcttgcgctcccgtatttccagccagtgccttaagcgcagcatccgcatgagtgaggagttcagacaattgctgggcggagttcgcacccgccagttggcgaaagagattgcggaaaaggtgacgggcaaagacgtcaggaagcgagcggagaacattctcaaagcctgcgggctggagcctaagaaagcaaaaaaacaggaaggagaagacgaacaggaaagtgctgagaggagcaagatgctggtttacaccacccaagaggcgattacacgcatggccgaactcctccagcagggcgacggaaaaacggacgaggccttggcagcggagttcggcaagctcatcagtgaatccgtcgccgtgccggacatggcgctgagcggcaggatgcttgaaacgggagtcctcaaagacacgacggttgaggcatcgcttcaagtcgcccatgccatttccacccatgaggcccggcccgaggtggactactatgtcgccgccgatgatgtccccggcgaggacgcgggcgcaggttacgtggatgaagccatgttcggttcggcatgtttctacaagtatttctccattcattgggaaacgctggtcaaaaacctgaagcccttcgggacgaatcacgaaaaactggcggcccataccgtcggcgccttcattcgcgccgcggccttggccaaccccacgggaaaacaaaatagttttgccgcgcacaaccctcctgacgggatgttggtggaagtcagaaacactcccatcagctacgccaacgccttcgccaaaccggcggctcctcagggcgaacgggacatcatctcgcagagcgtggcgcagcttgcccattatgtgaacgacatagatacgggatacggcaagccgacgaagcggttctggttctctccaaatctccgctatccgttgacggctaccaccacggagagcgaagacggaaaacagaaacagcgtgaggtcccgcttgccgacaaagatgttaagtctcttgacgaactgatagcggctgtactcaaggaaatcggttacgactggcaggaggccaagaaagtggtcctgaatccggaggtgccccatgagcgcaaagacgctgctacttcggcttgaaggtcctcttcaggcatggggcgatcagcaatccaagttcgtcattcggcgcacggccgaggcgccgaccaagtccggcgtcatcgggatgctttgcgcggcattgggcgtttcccggccagaggcccgcgaaggctggcttccaaggctggcccggctgcgcatgggcgtacgcgtcgatgcgccaggggtccgctggtgggattatcacacggtgggtgcggggatgccgatgcgtaccgccgaggggggaaccaagtccggagccatgctcacccgccgcgaatacctttgcgacgcctcgtttctcgtcgctcttcagggcgaaccggacctcattgaggaactggaggcggcaatcaaagcgcccaagtggacactctacctcggcagaaagtgctgccccccttgccgccctctgctggagcatccgggaggtgaattccccgacttgctttctgccctcgaatcggtcccctggcgtcggcggctgaaggacgatccccagccgcgacccgtcgattgcctgcttgattgggaacccaccaacgagcagcccgaggcgcccgatgatgcgctcgtctggtacgacgtgccgttgacattcgagccgccgtcgcaccaaccccgattcgtcatccgcaggcagttgcgcgtcggagcggacggcgacgtaacacttgcggtgcagccaccgcagagcgacacgccaccgcctccgcgcccaagagcggattacacgaacacagagtacaaaaaccgacgcaaggagcggctcgacgacgactatcacttgtgcgttttttgcaagtctcccgccagcaccgtgcagcacatcacgtaccgccgcgcgggcggcggcgaactccgggacgatttgcgctccctctgccgcctctgccacgacgccgtgaccatgatcgagtacgggctcggaatgggcttggaccgcatcaaccccgaagagccccgttggcgcgacaagatcatcgagaagcgggaagagattatcaggttccgctctctggagactcgccgcagacgccttgccgctgaggaggtggaatagccatgtacctctcctgcctcttgattgacgtcggcaccaaccccgaccgccccaggcccgggcggctctggctgcgaaacctccatcacgtccaccagcgcctttgcatggcgtttccatccaaagaccgaatatcccacgatccccacttcctcaagcctttcaaacccgcggactttgccaacaaccaggtccatgtaagacgtgacggcgactccggctttctcttccgcatcgacccgcaaccgggcgggcgggtcgtgatcctcgtccagtctaactctgccgtaaagcctgactggggctacgccttccacaacgcccgttttcttctgaatcctctagccgctccccctcaggtgcaggaattcgacccccgctttgagaagggtcagcggcttcgcttccgtatccgcgccaatctgagtaagaagataaaaaccagcacagagggcgttgatcttacgaggacgcgagaggggacagataagcggggccgcccgaaggcccaaggcaaacgcgtggcgctgacctgggacaaggaccagaaccgcgacgatgtgatacgaaaatggttcgccggcaagggcggccaaggtggattccaagtggaaactttccgggtcttgcagatcgggtggggcgcaggagaccgatccgacccgaggccgacgggcggccgcatgaaatttcgctcggcgttattggaggggacgcttacggttgaggacgcggacagcttcagagaaaccatcgtgggcggcgttgggcacggcaaagccttcggcttcggcctgctttccgtggcgccgctctcgctgtagcggcggtctccgaccgccggtacgtcgatcggagatcgacgctacaatcccttgtcgatcggggatccgtgcaacatttcttgagcggagatcgagccaatatgaaattcaaaccccgcttgcggcgactggactggctctatacgggcagcccaatctactatctcacgctgtgtacgcaggaccgcaaacgctcgttggcaaatcctgcgattcaccgggaattcacgagattctccgaacgggcgagcgattttcttgtttgggtcgggttcttcatgatcatgcctgatcacatccatcttttcgccggcttttgtcgtgagtccccacctttagggaaatggatcaaggcgctgcgcggggatttatccaaagtcctccgggaagatgagggcgagggcacacattgggagaaagactttttcgatcacgtcctgagatcgcaagaatcctatcgggagaaatatgaatatgtccggcagaatccggtccgggccggtttagtcaagcgcccggaagattggccgtaccagggtgagatccatcgcctggttttgtagcggcggtctccgaccgccgtaacgtcgatcggagatcgactacaaccccggtcgatcggagatcgacgctacaaccgccgtcgatcggagatcgacgctacagcacgggctggaggctctgtgagaattcaagatctccacgttctacccaagttcagtgacgggtggagttatctgtacgtcgagcattgccacgtcgatcaggaagagcgggccattgccgtccacgatcaagccgggaaggtgccggtcccctgtgccaatctggctctcctgatgttgggtccgggcgtctcgattactcacgccgccatctccgtgttggcggaccatgggtgcctggtggcttggtgcggggaggagggagtccgcttctacgccgtgggcatgggcgagacgcgcaacgcggccaacttcctgcatcaggcgaggctgtgggcggaccagggtttccatatgcaggtggtgcgccgcctctatcagttgcgattttcggagaagttcgaccctgccctgaccctccagcaaatccgcggcatggagggcgtgcgggtgcgcgatgcctacgccaaggccgcccaggaagccggcatcacgtggtcgggccgcagctataaacgcgatgagtggagcaaggcggaccctgccaaccgagccttgtccgccgctaactcctgcctatatggaatctgccatgctgccatcgtgtcagcaggtttttcgcccgcactcgggtttatccacaccggcaagatgctgtccttcgtctacgatctcgccgacctgtacaaggctgaaattaccgttccagtggcatttcgcgccgccgccgaggggacgggacagttggaacgccgggtgcgcatcacctgccgcgatcagttcgtatccacgcggcttctggagagaatcatcccggatgtccaaagggcgttgatgctggcaaaagcgacggcctgggacactaccttcgacctggatgccgccgcccccggcttcctctgggacaatctggaaggagaggtcgaaggcggccgcctgctagcccccgaaatcggtgaaacggagcccggcgatggtggtcctgattcttgagcgcgtccccccagggttgcgaggcgagctgactcgctggtttttggaacctcaggcgggagtgttcgtgggacgcgtctccgccatggtccgtgatcggctctgggaaaaagcctgcagccaggccaagggaggcgggtgcttgattatctattcaagcgacaatgaacagggctttcgagtccgaacctggggccaaacagctcgggtcatcgatgacttcgagggcctttttctcgttcgcatgccgcagaatcaataatttagtaagtgttgtccccacgcgcgtgggggtgaaccgccggggctgaaggtttcatgggctggaaagaagttgtccccacgcgcgtgggggtgaaccgatatgctgcatgtgccggggctggcgcttgatgttgtccccacgcgcgtgggggtgaaccggtatcggcgagtggcaaggcgaatccacttaggttgtccccacgcgcgtgggggtgaaccgacctccgagggcgcggggcgcgtgctggcgatgttgtccccacgcgcgtgggggtgaaccggctggggccgacgcgcgcttgtgagactgcgggttgtccccacgcgcgtgggggtgaaccgcgggagaactttgaaggcacggtcctcgatcacgttgtccccacgcgcgtgggggtgaaccggcgcaggttaaggctgaggccaaggccgatgcgttgtccccacgcgcgtgggggtgaaccgtaatggtggcttgcaccttctgctcgaccgatgttgtccccacgcgcgtgggggtgaaccgcagcgggccgtgttggaggagaaggtcgcggagttgtccccacgcgcgtgggggtgaaccgttcccagccgcaggcaggatcaccgtaccccagttgtccccacgcgcgtgggggtgaaccgcaaaacaatatcaagaccaagcacttggatgtgttgtccccacgcgcgtgggggtgaaccgcatcgggcagcacagcggccttataccccaaagttgtccccacgcgcgtgggggtgaaccggcagctcgcggcgattcgcattgccgctgaaagttgtccccacgcgcgtgggggtgaaccggggagtcgtgagtgtagttacaggcagggttcgttgtccccacgcgcgtgggggtgaaccgcttctgcatcttataaagaacgccagtttgaagttgtccccacgcgcgtgggggtgaaccggtacggttcccaggggaattatttcttggggtgttgtccccacgcgcgtgggggtgaaccgatgtagcttgatatgggtgtggtgtcgcagaagttgtccccacgcgcgtgggggtgaaccggcggcgcgcacattccaacctcgtccgtatccgttgtccccacgcgcgtgggggtgaaccggcggacacggcggatgtgacgaatatggagtcgttgtccccacgcgcgtgggggtgaaccggtctctcgaaaaggaaagccaactttcagcttgttgtccccacgcgcgtgggggtgaaccgctcttggcatagagcttagtgagtttgatgaagttgtccccacgcgcgtgggggtgaaccgcctttgccctccgagacgcaacagctccattcgttgtccccacgcgcgtgggggtgaaccggcgagcgcaggtctaagcgaccgcgacaaagagttgtccccacgcgcgtgggggtgaaccggtgatggacacttcctaaaatggcattaagtcgttgtccccacgcgcgtgggggtgaaccgcagcgggtagcgcagacttcgtgcatatcgaagtctgcggcttttgccgccgtgaatcttgaaaagccgcagacctgcaaaaagcgcaggtctgcgctacccactgcctggccatcctggagaattgaaagtccctccagtaaagcggcgaagcgcaggatttccggctgcttcaatcgcttgcgacgctcaccggtcagtagcgcgttggtaatttcgagcccccatacggctggaacaacgagcgtctgcccttcagtgccaccaggaccccgtccgcgtattcgctcgcttcatccggggagcaccaggcaagcgccaccgacgcatgcaccacaacgccgctcaaaatcgccgtccctcaattatcatttcgcggacgctcatggtgtggggctttacgcgcttgcgcaacgcgcgcatgccctcgacaatctcctcgtgcgtcagctttcgatccgagtctcgaaccggcaccagcattgccgccggaacgccgtgtcttgtaatcgtgatcctttcgcaacccatcttgtccagctaaagctccgcatcagctatagtctccctctggccgtgcggcccgccccttgcggcgcaaccaaaccgaagctcaaaacgcgacatcgtcctcgtagcgcgaccggacactgaaggtaaaggttcgccacccgtctcccctgcaaaaccgggtcgcggagtactattgctttgcacagcgggggacgaccgaggcgctacggaagaggttggttcgcgaaactgagcaagagacccctcacccgtcccgctccggctggtggaagcgccggagcgggacacgctcagccccaagggagagggctatggattcagttctacgcgcggtgtccagtcaaagatgtgggacacgctcagccccaagggagagggctatgga

SEQ ID NO: 1060 - DNA, 103159 bp, Artificial Sequence
  Synthetic Oligonucleotide
  misc_feature (1)..(93273): n is a, c, g, or t
nnnnnnnnnnnnnnnnnnnnnnnnnnnnnnnnnnnnnnnnnnnnnnnnnnnnnnnnnnnnnnnnnnnnnnnnnnnnnnnnnnnnnnnnnnnnnnnnnnnnnnnnnnnnnnnnnnnnnnnnnnnnnnnnnnnnnnnnnnnnnnnnnnnnnnnnnnnnnnnnnnnnnnnnnnnnnnnnnnnnnnnnnnnnnnnnnnnnnnnnnnnnnnnnnnnnnnnnnnnnnnnnnnnnnnnnnnnnnnnnnnnnnnnnnnnnnnnnnnnnnnnnnnnnnnnnnnnnnnnnnnnnnnnnnnnnnnnnnnnnnnnnnnnnnnnnnnnnnnnnnnnnnnnnnnnnnnnnnnnnnnnnnnnnnnnnnnnnnnnnnnnnnnnnnnnnnnnnnnnnnnnnnnnnnnnnnnnnnnnnnnnnnnnnnnnnnnnnnnnnnnnnnnnnnnnnnnnnnnnnnnnnnnnnnnnnnnnnnnnnnnnnnnnnnnnnnnnnnnnnnnnnnnnnnnnnnnnnnnnnnnnnnnnnnnnnnnnnnnnnnnnnnnnnnnnnnnnnnnnnnnnnnnnnnnnnnnnnnnnnnnnnnnnnnnnnnnnnnnnnnnnnnnnnnnnnnnnnnnnnnnnnnnnnnnnnnnnnnnnnnnnnnnnnnnnnnnnnnnnnnnnnnnnnnnnnnnnnnnnnnnnnnnnnnnnnnnnnnnnnnnnnnnnnnnnnnnnnnnnnnnnnnnnnnnnnnnnnnnnnnnnnnnnnnnnnnnnnnnnnnnnnnnnnnnnnnnnnnnnnnnnnnnnnnnnnnnnnnnnnnnnnnnnnnnnnnnnnnnnnnnnnnnnnnnnnnnnnnnnnnnnnnnnnnnnnnnnnnnnnnnnnnnnnnnnnnnnnnnnnnnnnnnnnnnnnnnnnnnnnnnnnnnnnnnnnnnnnnnnnnnnnnnnnnnnnnnnnnnnnnnnnnnnnnnnnnnnnnnnnnnnnnnnnnnnnnnnnnnnnnnnnnnnnnnnnnnnnnnnnnnnnnnnnnnnnnnnnnnnnnnnnnnnnnnnnnnnnnnnnnnnnnnnnnnnnnnnnnnnnnnnnnnnnnnnnnnnnnnnnnnnnnnnnnnnnnnnnnnnnnnnnnnnnnnnnnnnnnnnnnnnnnnnnnnnnnnnnnnnnnnnnnnnnnnnnnnnnnnnnnnnnnnnnnnnnnnnnnnnnnnnnnnnnnnnnnnnnnnnnnnnnnnnnnnnnnnnnnnnnnnnnnnnnnnnnnnnnnnnnnnnnnnnnnnnnnnnnnnnnnnnnnnnnnnnnnnnnnnnnnnnnnnnnnnnnnnnnnnnnnnnnnnnnnnnnnnnnnnnnnnnnnnnnnnnnnnnnnnnnnnnnnnnnnnnnnnnnnnnnnnnnnnnnnnnnnnnnnnnnnnnnnnnnnnnnnnnnnnnnnnnnnnnnnnnnnnnnnnnnnnnnnnnnnnnnnnnnnnnnnnnnnnnnnnnnnnnnnnnnnnnnnnnnnnnnnnnnnnnnnnnnnnnnnnnnnnnnnnnnnnnnnnnnnnnnnnnnnnnnnnnnnnnnnnnnnnnnnnnnnnnnnnnnnnnnnnnnnnnnnnnnnnnnnnnnnnnnnnnnnnnnnnnnnnnnnnnnnnnnnnnnnnnnnnnnnnnnnnnnnnnnnnnnnnnnnnnnnnnnnnnnnnnnnnnnnnnnnnnnnnnnnnnnnnnnnnnnnnnnnnnnnnnnnnnnnnnnnnnnnnnnnnnnnnnnnnnnnnnnnnnnnnnnnnnnnnnnnnnnnnnnnnnnnnnnnnnnnnnnnnnnnnnnnnnnnnnnnnnnnnnnnnnnnnnnnnnnnnnnnnnnnnnnnnnnnnnnnnnnnnnnnnnnnnnnnnnnnnnnnnnnnnnnnnnnnnnnnnnnnnnnnnnnnnnnnnnnnnnnnnnnnnnnnnnnnnnnnnnnnnnnnnnnnnnnnnnnnnnnnnnnnnnnnnnnnnnnnnnnnnnnnnnnnnnnnnnnnnnnnnnnnnnnnnnnnnnnnnnnnnnnnnnnnnnnnnnnnnnnnnnnnnnnnnnnnnnnnnnnnnnnnnnnnnnnnnnnnnnnnnnnnnnnnnnnnnnnnnnnnnnnnnnnnnnnnnnnnnnnnnnnnnnnnnnnnnnnnnnnnnnnnnnnnnnnnnnnnnnnnnnnnnnnnnnnnnnnnnnnnnnnnnnnnnnnnnnnnnnnnnnnnnnnnnnnnnnnnnnnnnnnnnnnnnnnnnnnnnnnnnnnnnnnnnnnnnnnnnnnnnnnnnnnnnnnnnnnnnnnnnnnnnnnnnnnnnnnnnnnnnnnnnnnnnnnnnnnnnnnnnnnnnnnnnnnnnnnnnnnnnnnnnnnnnnnnnnnnnnnnnnnnnnnnnnnnnnnnnnnnnnnnnnnnnnnnnnnnnnnnnnnnnnnnnnnnnnnnnnnnnnnnnnnnnnnnnnnnnnnnnnnnnnnnnnnnnnnnnnnnnnnnnnnnnnnnnnnnnnnnnnnnnnnnnnnnnnnnnnnnnnnnnnnnnnnnnnnnnnnnnnnnnnnnnnnnnnnnnnnnnnnnnnnnnnnnnnnnnnnnnnnnnnnnnnnnnnnnnnnnnnnnnnnnnnnnnnnnnnnnnnnnnnnnnnnnnnnnnnnnnnnnnnnnnnnnnnnnnnnnnnnnnnnnnnnnnnnnnnnnnnnnnnnnnnnnnnnnnnnnnnnnnnnnnnnnnnnnnnnnnnnnnnnnnnnnnnnnnnnnnnnnnnnnnnnnnnnnnnnnnnnnnnnnnnnnnnnnnnnnnnnnnnnnnnnnnnnnnnnnnnnnnnnnnnnnnnnnnnnnnnnnnnnnnnnnnnnnnnnnnnnnnnnnnnnnnnnnnnnnnnnnnnnnnnnnnnnnnnnnnnnnnnnnnnnnnnnnnnnnnnnnnnnnnnnnnnnnnnnnnnnnnnnnnnnnnnnnnnnnnnnnnnnnnnnnnnnnnnnnnnnnnnnnnnnnnnnnnnnnnnnnnnnnnnnnnnnnnnnnnnnnnnnnnnnnnnnnnnnnnnnnnnnnnnnnnnnnnnnnnnnnnnnnnnnnnnnnnnnnnnnnnnnnnnnnnnnnnnnnnnnnnnnnnnnnnnnnnnnnnnnnnnnnnnnnnnnnnnnnnnnnnnnnnnnnnnnnnnnnnnnnnnnnnnnnnnnnnnnnnnnnnnnnnnnnnnnnnnnnnnnnnnnnnnnnnnnnnnnnnnnnnnnnnnnnnnnnnnnnnnnnnnnnnnnnnnnnnnnnnnnnnnnnnnnnnnnnnnnnnnnnnnnnnnnnnnnnnnnnnnnnnnnnnnnnnnnnnnnnnnnnnnnnnnnnnnnnnnnnnnnnnnnnnnnnnnnnnnnnnnnnnnnnnnnnnnnnnnnnnnnnnnnnnnnnnnnnnnnnnnnnnnnnnnnnnnnnnnnnnnnnnnnnnnnnnnnnnnnnnnnnnnnnnnnnnnnnnnnnnnnnnnnnnnnnnnnnnnnnnnnnnnnnnnnnnnnnnnnnnnnnnnnnnnnnnnnnnnnnnnnnnnnnnnnnnnnnnnnnnnnnnnnnnnnnnnnnnnnnnnnnnnnnnnnnnnnnnnnnnnnnnnnnnnnnnnnnnnnnnnnnnnnnnnnnnnnnnnnnnnnnnnnnnnnnnnnnnnnnnnnnnnnnnnnnnnnnnnnnnnnnnnnnnnnnnnnnnnnnnnnnnnnnnnnnnnnnnnnnnnnnnnnnnnnnnnnnnnnnnnnnnnnnnnnnnnnnnnnnnnnnnnnnnnnnnnnnnnnnnnnnnnnnnnnnnnnnnnnnnnnnnnnnnnnnnnnnnnnnnnnnnnnnnnnnnnnnnnnnnnnnnnnnnnnnnnnnnnnnnnnnnnnnnnnnnnnnnnnnnnnnnnnnnnnnnnnnnnnnnnnnnnnnnnnnnnnnnnnnnnnnnnnnnnnnnnnnnnnnnnnnnnnnnnnnnnnnnnnnnnnnnnnnnnnnnnnnnnnnnnnnnnnnnnnnnnnnnnnnnnnnnnnnnnnnnnnnnnnnnnnnnnnnnnnnnnnnnnnnnnnnnnnnnnnnnnnnnnnnnnnnnnnnnnnnnnnnnnnnnnnnnnnnnnnnnnnnnnnnnnnnnnnnnnnnnnnnnnnnnnnnnnnnnnnnnnnnnnnnnnnnnnnnnnnnnnnnnnnnnnnnnnnnnnnnnnnnnnnnnnnnnnnnnnnnnnnnnnnnnnnnnnnnnnnnnnnnnnnnnnnnnnnnnnnnnnnnnnnnnnnnnnnnnnnnnnnnnnnnnnnnnnnnnnnnnnnnnnnnnnnnnnnnnnnnnnnnnnnnnnnnnnnnnnnnnnnnnnnnnnnnnnnnnnnnnnnnnnnnnnnnnnnnnnnnnnnnnnnnnnnnnnnnnnnnnnnnnnnnnnnnnnnnnnnnnnnnnnnnnnnnnnnnnnnnnnnnnnnnnnnnnnnnnnnnnnnnnnnnnnnnnnnnnnnnnnnnnnnnnnnnnnnnnnnnnnnnnnnnnnnnnnnnnnnnnnnnnnnnnnnnnnnnnnnnnnnnnnnnnnnnnnnnnnnnnnnnnnnnnnnnnnnnnnnnnnnnnnnnnnnnnnnnnnnnnnnnnnnnnnnnnnnnnnnnnnnnnnnnnnnnnnnnnnnnnnnnnnnnnnnnnnnnnnnnnnnnnnnnnnnnnnnnnnnnnnnnnnnnnnnnnnnnnnnnnnnnnnnnnnnnnnnnnnnnnnnnnnnnnnnnnnnnnnnnnnnnnnnnnnnnnnnnnnnnnnnnnnnnnnnnnnnnnnnnnnnnnnnnnnnnnnnnnnnnnnnnnnnnnnnnnnnnnnnnnnnnnnnnnnnnnnnnnnnnnnnnnnnnnnnnnnnnnnnnnnnnnnnnnnnnnnnnnnnnnnnnnnnnnnnnnnnnnnnnnnnnnnnnnnnnnnnnnnnnnnnnnnnnnnnnnnnnnnnnnnnnnnnnnnnnnnnnnnnnnnnnnnnnnnnnnnnnnnnnnnnnnnnnnnnnnnnnnnnnnnnnnnnnnnnnnnnnnnnnnnnnnnnnnnnnnnnnnnnnnnnnnnnnnnnnnnnnnnnnnnnnnnnnnnnnnnnnnnnnnnnnnnnnnnnnnnnnnnnnnnnnnnnnnnnnnnnnnnnnnnnnnnnnnnnnnnnnnnnnnnnnnnnnnnnnnnnnnnnnnnnnnnnnnnnnnnnnnnnnnnnnnnnnnnnnnnnnnnnnnnnnnnnnnnnnnnnnnnnnnnnnnnnnnnnnnnnnnnnnnnnnnnnnnnnnnnnnnnnnnnnnnnnnnnnnnnnnnnnnnnnnnnnnnnnnnnnnnnnnnnnnnnnnnnnnnnnnnnnnnnnnnnnnnnnnnnnnnnnnnnnnnnnnnnnnnnnnnnnnnnnnnnnnnnnnnnnnnnnnnnnnnnnnnnnnnnnnnnnnnnnnnnnnnnnnnnnnnnnnnnnnnnnnnnnnnnnnnnnnnnnnnnnnnnnnnnnnnnnnnnnnnnnnnnnnnnnnnnnnnnnnnnnnnnnnnnnnnnnnnnnnnnnnnnnnnnnnnnnnnnnnnnnnnnnnnnnnnnnnnnnnnnnnnnnnnnnnnnnnnnnnnnnnnnnnnnnnnnnnnnnnnnnnnnnnnnnnnnnnnnnnnnnnnnnnnnnnnnnnnnnnnnnnnnnnnnnnnnnnnnnnnnnnnnnnnnnnnnnnnnnnnnnnnnnnnnnnnnnnnnnnnnnnnnnnnnnnnnnnnnnnnnnnnnnnnnnnnnnnnnnnnnnnnnnnnnnnnnnnnnnnnnnnnnnnnnnnnnnnnnnnnnnnnnnnnnnnnnnnnnnnnnnnnnnnnnnnnnnnnnnnnnnnnnnnnnnnnnnnnnnnnnnnnnnnnnnnnnnnnnnnnnnnnnnnnnnnnnnnnnnnnnnnnnnnnnnnnnnnnnnnnnnnnnnnnnnnnnnnnnnnnnnnnnnnnnnnnnnnnnnnnnnnnnnnnnnnnnnnnnnnnnnnnnnnnnnnnnnnnnnnnnnnnnnnnnnnnnnnnnnnnnnnnnnnnnnnnnnnnnnnnnnnnnnnnnnnnnnnnnnnnnnnnnnnnnnnnnnnnnnnnnnnnnnnnnnnnnnnnnnnnnnnnnnnnnnnnnnnnnnnnnnnnnnnnnnnnnnnnnnnnnnnnnnnnnnnnnnnnnnnnnnnnnnnnnnnnnnnnnnnnnnnnnnnnnnnnnnnnnnnnnnnnnnnnnnnnnnnnnnnnnnnnnnnnnnnnnnnnnnnnnnnnnnnnnnnnnnnnnnnnnnnnnnnnnnnnnnnnnnnnnnnnnnnnnnnnnnnnnnnnnnnnnnnnnnnnnnnnnnnnnnnnnnnnnnnnnnnnnnnnnnnnnnnnnnnnnnnnnnnnnnnnnnnnnnnnnnnnnnnnnnnnnnnnnnnnnnnnnnnnnnnnnnnnnnnnnnnnnnnnnnnnnnnnnnnnnnnnnnnnnnnnnnnnnnnnnnnnnnnnnnnnnnnnnnnnnnnnnnnnnnnnnnnnnnnnnnnnnnnnnnnnnnnnnnnnnnnnnnnnnnnnnnnnnnnnnnnnnnnnnnnnnnnnnnnnnnnnnnnnnnnnnnnnnnnnnnnnnnnnnnnnnnnnnnnnnnnnnnnnnnnnnnnnnnnnnnnnnnnnnnnnnnnnnnnnnnnnnnnnnnnnnnnnnnnnnnnnnnnnnnnnnnnnnnnnnnnnnnnnnnnnnnnnnnnnnnnnnnnnnnnnnnnnnnnnnnnnnnnnnnnnnnnnnnnnnnnnnnnnnnnnnnnnnnnnnnnnnnnnnnnnnnnnnnnnnnnnnnnnnnnnnnnnnnnnnnnnnnnnnnnnnnnnnnnnnnnnnnnnnnnnnnnnnnnnnnnnnnnnnnnnnnnnnnnnnnnnnnnnnnnnnnnnnnnnnnnnnnnnnnnnnnnnnnnnnnnnnnnnnnnnnnnnnnnnnnnnnnnnnnnnnnnnnnnnnnnnnnnnnnnnnnnnnnnnnnnnnnnnnnnnnnnnnnnnnnnnnnnnnnnnnnnnnnnnnnnnnnnnnnnnnnnnnnnnnnnnnnnnnnnnnnnnnnnnnnnnnnnnnnnnnnnnnnnnnnnnnnnnnnnnnnnnnnnnnnnnnnnnnnnnnnnnnnnnnnnnnnnnnnnnnnnnnnnnnnnnnnnnnnnnnnnnnnnnnnnnnnnnnnnnnnnnnnnnnnnnnnnnnnnnnnnnnnnnnnnnnnnnnnnnnnnnnnnnnnnnnnnnnnnnnnnnnnnnnnnnnnnnnnnnnnnnnnnnnnnnnnnnnnnnnnnnnnnnnnnnnnnnnnnnnnnnnnnnnnnnnnnnnnnnnnnnnnnnnnnnnnnnnnnnnnnnnnnnnnnnnnnnnnnnnnnnnnnnnnnnnnnnnnnnnnnnnnnnnnnnnnnnnnnnnnnnnnnnnnnnnnnnnnnnnnnnnnnnnnnnnnnnnnnnnnnnnnnnnnnnnnnnnnnnnnnnnnnnnnnnnnnnnnnnnnnnnnnnnnnnnnnnnnnnnnnnnnnnnnnnnnnnnnnnnnnnnnnnnnnnnnnnnnnnnnnnnnnnnnnnnnnnnnnnnnnnnnnnnnnnnnnnnnnnnnnnnnnnnnnnnnnnnnnnnnnnnnnnnnnnnnnnnnnnnnnnnnnnnnnnnnnnnnnnnnnnnnnnnnnnnnnnnnnnnnnnnnnnnnnnnnnnnnnnnnnnnnnnnnnnnnnnnnnnnnnnnnnnnnnnnnnnnnnnnnnnnnnnnnnnnnnnnnnnnnnnnnnnnnnnnnnnnnnnnnnnnnnnnnnnnnnnnnnnnnnnnnnnnnnnnnnnnnnnnnnnnnnnnnnnnnnnnnnnnnnnnnnnnnnnnnnnnnnnnnnnnnnnnnnnnnnnnnnnnnnnnnnnnnnnnnnnnnnnnnnnnnnnnnnnnnnnnnnnnnnnnnnnnnnnnnnnnnnnnnnnnnnnnnnnnnnnnnnnnnnnnnnnnnnnnnnnnnnnnnnnnnnnnnnnnnnnnnnnnnnnnnnnnnnnnnnnnnnnnnnnnnnnnnnnnnnnnnnnnnnnnnnnnnnnnnnnnnnnnnnnnnnnnnnnnnnnnnnnnnnnnnnnnnnnnnnnnnnnnnnnnnnnnnnnnnnnnnnnnnnnnnnnnnnnnnnnnnnnnnnnnnnnnnnnnnnnnnnnnnnnnnnnnnnnnnnnnnnnnnnnnnnnnnnnnnnnnnnnnnnnnnnnnnnnnnnnnnnnnnnnnnnnnnnnnnnnnnnnnnnnnnnnnnnnnnnnnnnnnnnnnnnnnnnnnnnnnnnnnnnnnnnnnnnnnnnnnnnnnnnnnnnnnnnnnnnnnnnnnnnnnnnnnnnnnnnnnnnnnnnnnnnnnnnnnnnnnnnnnnnnnnnnnnnnnnnnnnnnnnnnnnnnnnnnnnnnnnnnnnnnnnnnnnnnnnnnnnnnnnnnnnnnnnnnnnnnnnnnnnnnnnnnnnnnnnnnnnnnnnnnnnnnnnnnnnnnnnnnnnnnnnnnnnnnnnnnnnnnnnnnnnnnnnnnnnnnnnnnnnnnnnnnnnnnnnnnnnnnnnnnnnnnnnnnnnnnnnnnnnnnnnnnnnnnnnnnnnnnnnnnnnnnnnnnnnnnnnnnnnnnnnnnnnnnnnnnnnnnnnnnnnnnnnnnnnnnnnnnnnnnnnnnnnnnnnnnnnnnnnnnnnnnnnnnnnnnnnnnnnnnnnnnnnnnnnnnnnnnnnnnnnnnnnnnnnnnnnnnnnnnnnnnnnnnnnnnnnnnnnnnnnnnnnnnnnnnnnnnnnnnnnnnnnnnnnnnnnnnnnnnnnnnnnnnnnnnnnnnnnnnnnnnnnnnnnnnnnnnnnnnnnnnnnnnnnnnnnnnnnnnnnnnnnnnnnnnnnnnnnnnnnnnnnnnnnnnnnnnnnnnnnnnnnnnnnnnnnnnnnnnnnnnnnnnnnnnnnnnnnnnnnnnnnnnnnnnnnnnnnnnnnnnnnnnnnnnnnnnnnnnnnnnnnnnnnnnnnnnnnnnnnnnnnnnnnnnnnnnnnnnnnnnnnnnnnnnnnnnnnnnnnnnnnnnnnnnnnnnnnnnnnnnnnnnnnnnnnnnnnnnnnnnnnnnnnnnnnnnnnnnnnnnnnnnnnnnnnnnnnnnnnnnnnnnnnnnnnnnnnnnnnnnnnnnnnnnnnnnnnnnnnnnnnnnnnnnnnnnnnnnnnnnnnnnnnnnnnnnnnnnnnnnnnnnnnnnnnnnnnnnnnnnnnnnnnnnnnnnnnnnnnnnnnnnnnnnnnnnnnnnnnnnnnnnnnnnnnnnnnnnnnnnnnnnnnnnnnnnnnnnnnnnnnnnnnnnnnnnnnnnnnnnnnnnnnnnnnnnnnnnnnnnnnnnnnnnnnnnnnnnnnnnnnnnnnnnnnnnnnnnnnnnnnnnnnnnnnnnnnnnnnnnnnnnnnnnnnnnnnnnnnnnnnnnnnnnnnnnnnnnnnnnnnnnnnnnnnnnnnnnnnnnnnnnnnnnnnnnnnnnnnnnnnnnnnnnnnnnnnnnnnnnnnnnnnnnnnnnnnnnnnnnnnnnnnnnnnnnnnnnnnnnnnnnnnnnnnnnnnnnnnnnnnnnnnnnnnnnnnnnnnnnnnnnnnnnnnnnnnnnnnnnnnnnnnnnnnnnnnnnnnnnnnnnnnnnnnnnnnnnnnnnnnnnnnnnnnnnnnnnnnnnnnnnnnnnnnnnnnnnnnnnnnnnnnnnnnnnnnnnnnnnnnnnnnnnnnnnnnnnnnnnnnnnnnnnnnnnnnnnnnnnnnnnnnnnnnnnnnnnnnnnnnnnnnnnnnnnnnnnnnnnnnnnnnnnnnnnnnnnnnnnnnnnnnnnnnnnnnnnnnnnnnnnnnnnnnnnnnnnnnnnnnnnnnnnnnnnnnnnnnnnnnnnnnnnnnnnnnnnnnnnnnnnnnnnnnnnnnnnnnnnnnnnnnnnnnnnnnnnnnnnnnnnnnnnnnnnnnnnnnnnnnnnnnnnnnnnnnnnnnnnnnnnnnnnnnnnnnnnnnnnnnnnnnnnnnnnnnnnnnnnnnnnnnnnnnnnnnnnnnnnnnnnnnnnnnnnnnnnnnnnnnnnnnnnnnnnnnnnnnnnnnnnnnnnnnnnnnnnnnnnnnnnnnnnnnnnnnnnnnnnnnnnnnnnnnnnnnnnnnnnnnnnnnnnnnnnnnnnnnnnnnnnnnnnnnnnnnnnnnnnnnnnnnnnnnnnnnnnnnnnnnnnnnnnnnnnnnnnnnnnnnnnnnnnnnnnnnnnnnnnnnnnnnnnnnnnnnnnnnnnnnnnnnnnnnnnnnnnnnnnnnnnnnnnnnnnnnnnnnnnnnnnnnnnnnnnnnnnnnnnnnnnnnnnnnnnnnnnnnnnnnnnnnnnnnnnnnnnnnnnnnnnnnnnnnnnnnnnnnnnnnnnnnnnnnnnnnnnnnnnnnnnnnnnnnnnnnnnnnnnnnnnnnnnnnnnnnnnnnnnnnnnnnnnnnnnnnnnnnnnnnnnnnnnnnnnnnnnnnnnnnnnnnnnnnnnnnnnnnnnnnnnnnnnnnnnnnnnnnnnnnnnnnnnnnnnnnnnnnnnnnnnnnnnnnnnnnnnnnnnnnnnnnnnnnnnnnnnnnnnnnnnnnnnnnnnnnnnnnnnnnnnnnnnnnnnnnnnnnnnnnnnnnnnnnnnnnnnnnnnnnnnnnnnnnnnnnnnnnnnnnnnnnnnnnnnnnnnnnnnnnnnnnnnnnnnnnnnnnnnnnnnnnnnnnnnnnnnnnnnnnnnnnnnnnnnnnnnnnnnnnnnnnnnnnnnnnnnnnnnnnnnnnnnnnnnnnnnnnnnnnnnnnnnnnnnnnnnnnnnnnnnnnnnnnnnnnnnnnnnnnnnnnnnnnnnnnnnnnnnnnnnnnnnnnnnnnnnnnnnnnnnnnnnnnnnnnnnnnnnnnnnnnnnnnnnnnnnnnnnnnnnnnnnnnnnnnnnnnnnnnnnnnnnnnnnnnnnnnnnnnnnnnnnnnnnnnnnnnnnnnnnnnnnnnnnnnnnnnnnnnnnnnnnnnnnnnnnnnnnnnnnnnnnnnnnnnnnnnnnnnnnnnnnnnnnnnnnnnnnnnnnnnnnnnnnnnnnnnnnnnnnnnnnnnnnnnnnnnnnnnnnnnnnnnnnnnnnnnnnnnnnnnnnnnnnnnnnnnnnnnnnnnnnnnnnnnnnnnnnnnnnnnnnnnnnnnnnnnnnnnnnnnnnnnnnnnnnnnnnnnnnnnnnnnnnnnnnnnnnnnnnnnnnnnnnnnnnnnnnnnnnnnnnnnnnnnnnnnnnnnnnnnnnnnnnnnnnnnnnnnnnnnnnnnnnnnnnnnnnnnnnnnnnnnnnnnnnnnnnnnnnnnnnnnnnnnnnnnnnnnnnnnnnnnnnnnnnnnnnnnnnnnnnnnnnnnnnnnnnnnnnnnnnnnnnnnnnnnnnnnnnnnnnnnnnnnnnnnnnnnnnnnnnnnnnnnnnnnnnnnnnnnnnnnnnnnnnnnnnnnnnnnnnnnnnnnnnnnnnnnnnnnnnnnnnnnnnnnnnnnnnnnnnnnnnnnnnnnnnnnnnnnnnnnnnnnnnnnnnnnnnnnnnnnnnnnnnnnnnnnnnnnnnnnnnnnnnnnnnnnnnnnnnnnnnnnnnnnnnnnnnnnnnnnnnnnnnnnnnnnnnnnnnnnnnnnnnnnnnnnnnnnnnnnnnnnnnnnnnnnnnnnnnnnnnnnnnnnnnnnnnnnnnnnnnnnnnnnnnnnnnnnnnnnnnnnnnnnnnnnnnnnnnnnnnnnnnnnnnnnnnnnnnnnnnnnnnnnnnnnnnnnnnnnnnnnnnnnnnnnnnnnnnnnnnnnnnnnnnnnnnnnnnnnnnnnnnnnnnnnnnnnnnnnnnnnnnnnnnnnnnnnnnnnnnnnnnnnnnnnnnnnnnnnnnnnnnnnnnnnnnnnnnnnnnnnnnnnnnnnnnnnnnnnnnnnnnnnnnnnnnnnnnnnnnnnnnnnnnnnnnnnnnnnnnnnnnnnnnnnnnnnnnnnnnnnnnnnnnnnnnnnnnnnnnnnnnnnnnnnnnnnnnnnnnnnnnnnnnnnnnnnnnnnnnnnnnnnnnnnnnnnnnnnnnnnnnnnnnnnnnnnnnnnnnnnnnnnnnnnnnnnnnnnnnnnnnnnnnnnnnnnnnnnnnnnnnnnnnnnnnnnnnnnnnnnnnnnnnnnnnnnnnnnnnnnnnnnnnnnnnnnnnnnnnnnnnnnnnnnnnnnnnnnnnnnnnnnnnnnnnnnnnnnnnnnnnnnnnnnnnnnnnnnnnnnnnnnnnnnnnnnnnnnnnnnnnnnnnnnnnnnnnnnnnnnnnnnnnnnnnnnnnnnnnnnnnnnnnnnnnnnnnnnnnnnnnnnnnnnnnnnnnnnnnnnnnnnnnnnnnnnnnnnnnnnnnnnnnnnnnnnnnnnnnnnnnnnnnnnnnnnnnnnnnnnnnnnnnnnnnnnnnnnnnnnnnnnnnnnnnnnnnnnnnnnnnnnnnnnnnnnnnnnnnnnnnnnnnnnnnnnnnnnnnnnnnnnnnnnnnnnnnnnnnnnnnnnnnnnnnnnnnnnnnnnnnnnnnnnnnnnnnnnnnnnnnnnnnnnnnnnnnnnnnnnnnnnnnnnnnnnnnnnnnnnnnnnnnnnnnnnnnnnnnnnnnnnnnnnnnnnnnnnnnnnnnnnnnnnnnnnnnnnnnnnnnnnnnnnnnnnnnnnnnnnnnnnnnnnnnnnnnnnnnnnnnnnnnnnnnnnnnnnnnnnnnnnnnnnnnnnnnnnnnnnnnnnnnnnnnnnnnnnnnnnnnnnnnnnnnnnnnnnnnnnnnnnnnnnnnnnnnnnnnnnnnnnnnnnnnnnnnnnnnnnnnnnnnnnnnnnnnnnnnnnnnnnnnnnnnnnnnnnnnnnnnnnnnnnnnnnnnnnnnnnnnnnnnnnnnnnnnnnnnnnnnnnnnnnnnnnnnnnnnnnnnnnnnnnnnnnnnnnnnnnnnnnnnnnnnnnnnnnnnnnnnnnnnnnnnnnnnnnnnnnnnnnnnnnnnnnnnnnnnnnnnnnnnnnnnnnnnnnnnnnnnnnnnnnnnnnnnnnnnnnnnnnnnnnnnnnnnnnnnnnnnnnnnnnnnnnnnnnnnnnnnnnnnnnnnnnnnnnnnnnnnnnnnnnnnnnnnnnnnnnnnnnnnnnnnnnnnnnnnnnnnnnnnnnnnnnnnnnnnnnnnnnnnnnnnnnnnnnnnnnnnnnnnnnnnnnnnnnnnnnnnnnnnnnnnnnnnnnnnnnnnnnnnnnnnnnnnnnnnnnnnnnnnnnnnnnnnnnnnnnnnnnnnnnnnnnnnnnnnnnnnnnnnnnnnnnnnnnnnnnnnnnnnnnnnnnnnnnnnnnnnnnnnnnnnnnnnnnnnnnnnnnnnnnnnnnnnnnnnnnnnnnnnnnnnnnnnnnnnnnnnnnnnnnnnnnnnnnnnnnnnnnnnnnnnnnnnnnnnnnnnnnnnnnnnnnnnnnnnnnnnnnnnnnnnnnnnnnnnnnnnnnnnnnnnnnnnnnnnnnnnnnnnnnnnnnnnnnnnnnnnnnnnnnnnnnnnnnnnnnnnnnnnnnnnnnnnnnnnnnnnnnnnnnnnnnnnnnnnnnnnnnnnnnnnnnnnnnnnnnnnnnnnnnnnnnnnnnnnnnnnnnnnnnnnnnnnnnnnnnnnnnnnnnnnnnnnnnnnnnnnnnnnnnnnnnnnnnnnnnnnnnnnnnnnnnnnnnnnnnnnnnnnnnnnnnnnnnnnnnnnnnnnnnnnnnnnnnnnnnnnnnnnnnnnnnnnnnnnnnnnnnnnnnnnnnnnnnnnnnnnnnnnnnnnnnnnnnnnnnnnnnnnnnnnnnnnnnnnnnnnnnnnnnnnnnnnnnnnnnnnnnnnnnnnnnnnnnnnnnnnnnnnnnnnnnnnnnnnnnnnnnnnnnnnnnnnnnnnnnnnnnnnnnnnnnnnnnnnnnnnnnnnnnnnnnnnnnnnnnnnnnnnnnnnnnnnnnnnnnnnnnnnnnnnnnnnnnnnnnnnnnnnnnnnnnnnnnnnnnnnnnnnnnnnnnnnnnnnnnnnnnnnnnnnnnnnnnnnnnnnnnnnnnnnnnnnnnnnnnnnnnnnnnnnnnnnnnnnnnnnnnnnnnnnnnnnnnnnnnnnnnnnnnnnnnnnnnnnnnnnnnnnnnnnnnnnnnnnnnnnnnnnnnnnnnnnnnnnnnnnnnnnnnnnnnnnnnnnnnnnnnnnnnnnnnnnnnnnnnnnnnnnnnnnnnnnnnnnnnnnnnnnnnnnnnnnnnnnnnnnnnnnnnnnnnnnnnnnnnnnnnnnnnnnnnnnnnnnnnnnnnnnnnnnnnnnnnnnnnnnnnnnnnnnnnnnnnnnnnnnnnnnnnnnnnnnnnnnnnnnnnnnnnnnnnnnnnnnnnnnnnnnnnnnnnnnnnnnnnnnnnnnnnnnnnnnnnnnnnnnnnnnnnnnnnnnnnnnnnnnnnnnnnnnnnnnnnnnnnnnnnnnnnnnnnnnnnnnnnnnnnnnnnnnnnnnnnnnnnnnnnnnnnnnnnnnnnnnnnnnnnnnnnnnnnnnnnnnnnnnnnnnnnnnnnnnnnnnnnnnnnnnnnnnnnnnnnnnnnnnnnnnnnnnnnnnnnnnnnnnnnnnnnnnnnnnnnnnnnnnnnnnnnnnnnnnnnnnnnnnnnnnnnnnnnnnnnnnnnnnnnnnnnnnnnnnnnnnnnnnnnnnnnnnnnnnnnnnnnnnnnnnnnnnnnnnnnnnnnnnnnnnnnnnnnnnnnnnnnnnnnnnnnnnnnnnnnnnnnnnnnnnnnnnnnnnnnnnnnnnnnnnnnnnnnnnnnnnnnnnnnnnnnnnnnnnnnnnnnnnnnnnnnnnnnnnnnnnnnnnnnnnnnnnnnnnnnnnnnnnnnnnnnnnnnnnnnnnnnnnnnnnnnnnnnnnnnnnnnnnnnnnnnnnnnnnnnnnnnnnnnnnnnnnnnnnnnnnnnnnnnnnnnnnnnnnnnnnnnnnnnnnnnnnnnnnnnnnnnnnnnnnnnnnnnnnnnnnnnnnnnnnnnnnnnnnnnnnnnnnnnnnnnnnnnnnnnnnnnnnnnnnnnnnnnnnnnnnnnnnnnnnnnnnnnnnnnnnnnnnnnnnnnnnnnnnnnnnnnnnnnnnnnnnnnnnnnnnnnnnnnnnnnnnnnnnnnnnnnnnnnnnnnnnnnnnnnnnnnnnnnnnnnnnnnnnnnnnnnnnnnnnnnnnnnnnnnnnnnnnnnnnnnnnnnnnnnnnnnnnnnnnnnnnnnnnnnnnnnnnnnnnnnnnnnnnnnnnnnnnnnnnnnnnnnnnnnnnnnnnnnnnnnnnnnnnnnnnnnnnnnnnnnnnnnnnnnnnnnnnnnnnnnnnnnnnnnnnnnnnnnnnnnnnnnnnnnnnnnnnnnnnnnnnnnnnnnnnnnnnnnnnnnnnnnnnnnnnnnnnnnnnnnnnnnnnnnnnnnnnnnnnnnnnnnnnnnnnnnnnnnnnnnnnnnnnnnnnnnnnnnnnnnnnnnnnnnnnnnnnnnnnnnnnnnnnnnnnnnnnnnnnnnnnnnnnnnnnnnnnnnnnnnnnnnnnnnnnnnnnnnnnnnnnnnnnnnnnnnnnnnnnnnnnnnnnnnnnnnnnnnnnnnnnnnnnnnnnnnnnnnnnnnnnnnnnnnnnnnnnnnnnnnnnnnnnnnnnnnnnnnnnnnnnnnnnnnnnnnnnnnnnnnnnnnnnnnnnnnnnnnnnnnnnnnnnnnnnnnnnnnnnnnnnnnnnnnnnnnnnnnnnnnnnnnnnnnnnnnnnnnnnnnnnnnnnnnnnnnnnnnnnnnnnnnnnnnnnnnnnnnnnnnnnnnnnnnnnnnnnnnnnnnnnnnnnnnnnnnnnnnnnnnnnnnnnnnnnnnnnnnnnnnnnnnnnnnnnnnnnnnnnnnnnnnnnnnnnnnnnnnnnnnnnnnnnnnnnnnnnnnnnnnnnnnnnnnnnnnnnnnnnnnnnnnnnnnnnnnnnnnnnnnnnnnnnnnnnnnnnnnnnnnnnnnnnnnnnnnnnnnnnnnnnnnnnnnnnnnnnnnnnnnnnnnnnnnnnnnnnnnnnnnnnnnnnnnnnnnnnnnnnnnnnnnnnnnnnnnnnnnnnnnnnnnnnnnnnnnnnnnnnnnnnnnnnnnnnnnnnnnnnnnnnnnnnnnnnnnnnnnnnnnnnnnnnnnnnnnnnnnnnnnnnnnnnnnnnnnnnnnnnnnnnnnnnnnnnnnnnnnnnnnnnnnnnnnnnnnnnnnnnnnnnnnnnnnnnnnnnnnnnnnnnnnnnnnnnnnnnnnnnnnnnnnnnnnnnnnnnnnnnnnnnnnnnnnnnnnnnnnnnnnnnnnnnnnnnnnnnnnnnnnnnnnnnnnnnnnnnnnnnnnnnnnnnnnnnnnnnnnnnnnnnnnnnnnnnnnnnnnnnnnnnnnnnnnnnnnnnnnnnnnnnnnnnnnnnnnnnnnnnnnnnnnnnnnnnnnnnnnnnnnnnnnnnnnnnnnnnnnnnnnnnnnnnnnnnnnnnnnnnnnnnnnnnnnnnnnnnnnnnnnnnnnnnnnnnnnnnnnnnnnnnnnnnnnnnnnnnnnnnnnnnnnnnnnnnnnnnnnnnnnnnnnnnnnnnnnnnnnnnnnnnnnnnnnnnnnnnnnnnnnnnnnnnnnnnnnnnnnnnnnnnnnnnnnnnnnnnnnnnnnnnnnnnnnnnnnnnnnnnnnnnnnnnnnnnnnnnnnnnnnnnnnnnnnnnnnnnnnnnnnnnnnnnnnnnnnnnnnnnnnnnnnnnnnnnnnnnnnnnnnnnnnnnnnnnnnnnnnnnnnnnnnnnnnnnnnnnnnnnnnnnnnnnnnnnnnnnnnnnnnnnnnnnnnnnnnnnnnnnnnnnnnnnnnnnnnnnnnnnnnnnnnnnnnnnnnnnnnnnnnnnnnnnnnnnnnnnnnnnnnnnnnnnnnnnnnnnnnnnnnnnnnnnnnnnnnnnnnnnnnnnnnnnnnnnnnnnnnnnnnnnnnnnnnnnnnnnnnnnnnnnnnnnnnnnnnnnnnnnnnnnnnnnnnnnnnnnnnnnnnnnnnnnnnnnnnnnnnnnnnnnnnnnnnnnnnnnnnnnnnnnnnnnnnnnnnnnnnnnnnnnnnnnnnnnnnnnnnnnnnnnnnnnnnnnnnnnnnnnnnnnnnnnnnnnnnnnnnnnnnnnnnnnnnnnnnnnnnnnnnnnnnnnnnnnnnnnnnnnnnnnnnnnnnnnnnnnnnnnnnnnnnnnnnnnnnnnnnnnnnnnnnnnnnnnnnnnnnnnnnnnnnnnnnnnnnnnnnnnnnnnnnnnnnnnnnnnnnnnnnnnnnnnnnnnnnnnnnnnnnnnnnnnnnnnnnnnnnnnnnnnnnnnnnnnnnnnnnnnnnnnnnnnnnnnnnnnnnnnnnnnnnnnnnnnnnnnnnnnnnnnnnnnnnnnnnnnnnnnnnnnnnnnnnnnnnnnnnnnnnnnnnnnnnnnnnnnnnnnnnnnnnnnnnnnnnnnnnnnnnnnnnnnnnnnnnnnnnnnnnnnnnnnnnnnnnnnnnnnnnnnnnnnnnnnnnnnnnnnnnnnnnnnnnnnnnnnnnnnnnnnnnnnnnnnnnnnnnnnnnnnnnnnnnnnnnnnnnnnnnnnnnnnnnnnnnnnnnnnnnnnnnnnnnnnnnnnnnnnnnnnnnnnnnnnnnnnnnnnnnnnnnnnnnnnnnnnnnnnnnnnnnnnnnnnnnnnnnnnnnnnnnnnnnnnnnnnnnnnnnnnnnnnnnnnnnnnnnnnnnnnnnnnnnnnnnnnnnnnnnnnnnnnnnnnnnnnnnnnnnnnnnnnnnnnnnnnnnnnnnnnnnnnnnnnnnnnnnnnnnnnnnnnnnnnnnnnnnnnnnnnnnnnnnnnnnnnnnnnnnnnnnnnnnnnnnnnnnnnnnnnnnnnnnnnnnnnnnnnnnnnnnnnnnnnnnnnnnnnnnnnnnnnnnnnnnnnnnnnnnnnnnnnnnnnnnnnnnnnnnnnnnnnnnnnnnnnnnnnnnnnnnnnnnnnnnnnnnnnnnnnnnnnnnnnnnnnnnnnnnnnnnnnnnnnnnnnnnnnnnnnnnnnnnnnnnnnnnnnnnnnnnnnnnnnnnnnnnnnnnnnnnnnnnnnnnnnnnnnnnnnnnnnnnnnnnnnnnnnnnnnnnnnnnnnnnnnnnnnnnnnnnnnnnnnnnnnnnnnnnnnnnnnnnnnnnnnnnnnnnnnnnnnnnnnnnnnnnnnnnnnnnnnnnnnnnnnnnnnnnnnnnnnnnnnnnnnnnnnnnnnnnnnnnnnnnnnnnnnnnnnnnnnnnnnnnnnnnnnnnnnnnnnnnnnnnnnnnnnnnnnnnnnnnnnnnnnnnnnnnnnnnnnnnnnnnnnnnnnnnnnnnnnnnnnnnnnnnnnnnnnnnnnnnnnnnnnnnnnnnnnnnnnnnnnnnnnnnnnnnnnnnnnnnnnnnnnnnnnnnnnnnnnnnnnnnnnnnnnnnnnnnnnnnnnnnnnnnnnnnnnnnnnnnnnnnnnnnnnnnnnnnnnnnnnnnnnnnnnnnnnnnnnnnnnnnnnnnnnnnnnnnnnnnnnnnnnnnnnnnnnnnnnnnnnnnnnnnnnnnnnnnnnnnnnnnnnnnnnnnnnnnnnnnnnnnnnnnnnnnnnnnnnnnnnnnnnnnnnnnnnnnnnnnnnnnnnnnnnnnnnnnnnnnnnnnnnnnnnnnnnnnnnnnnnnnnnnnnnnnnnnnnnnnnnnnnnnnnnnnnnnnnnnnnnnnnnnnnnnnnnnnnnnnnnnnnnnnnnnnnnnnnnnnnnnnnnnnnnnnnnnnnnnnnnnnnnnnnnnnnnnnnnnnnnnnnnnnnnnnnnnnnnnnnnnnnnnnnnnnnnnnnnnnnnnnnnnnnnnnnnnnnnnnnnnnnnnnnnnnnnnnnnnnnnnnnnnnnnnnnnnnnnnnnnnnnnnnnnnnnnnnnnnnnnnnnnnnnnnnnnnnnnnnnnnnnnnnnnnnnnnnnnnnnnnnnnnnnnnnnnnnnnnnnnnnnnnnnnnnnnnnnnnnnnnnnnnnnnnnnnnnnnnnnnnnnnnnnnnnnnnnnnnnnnnnnnnnnnnnnnnnnnnnnnnnnnnnnnnnnnnnnnnnnnnnnnnnnnnnnnnnnnnnnnnnnnnnnnnnnnnnnnnnnnnnnnnnnnnnnnnnnnnnnnnnnnnnnnnnnnnnnnnnnnnnnnnnnnnnnnnnnnnnnnnnnnnnnnnnnnnnnnnnnnnnnnnnnnnnnnnnnnnnnnnnnnnnnnnnnnnnnnnnnnnnnnnnnnnnnnnnnnnnnnnnnnnnnnnnnnnnnnnnnnnnnnnnnnnnnnnnnnnnnnnnnnnnnnnnnnnnnnnnnnnnnnnnnnnnnnnnnnnnnnnnnnnnnnnnnnnnnnnnnnnnnnnnnnnnnnnnnnnnnnnnnnnnnnnnnnnnnnnnnnnnnnnnnnnnnnnnnnnnnnnnnnnnnnnnnnnnnnnnnnnnnnnnnnnnnnnnnnnnnnnnnnnnnnnnnnnnnnnnnnnnnnnnnnnnnnnnnnnnnnnnnnnnnnnnnnnnnnnnnnnnnnnnnnnnnnnnnnnnnnnnnnnnnnnnnnnnnnnnnnnnnnnnnnnnnnnnnnnnnnnnnnnnnnnnnnnnnnnnnnnnnnnnnnnnnnnnnnnnnnnnnnnnnnnnnnnnnnnnnnnnnnnnnnnnnnnnnnnnnnnnnnnnnnnnnnnnnnnnnnnnnnnnnnnnnnnnnnnnnnnnnnnnnnnnnnnnnnnnnnnnnnnnnnnnnnnnnnnnnnnnnnnnnnnnnnnnnnnnnnnnnnnnnnnnnnnnnnnnnnnnnnnnnnnnnnnnnnnnnnnnnnnnnnnnnnnnnnnnnnnnnnnnnnnnnnnnnnnnnnnnnnnnnnnnnnnnnnnnnnnnnnnnnnnnnnnnnnnnnnnnnnnnnnnnnnnnnnnnnnnnnnnnnnnnnnnnnnnnnnnnnnnnnnnnnnnnnnnnnnnnnnnnnnnnnnnnnnnnnnnnnnnnnnnnnnnnnnnnnnnnnnnnnnnnnnnnnnnnnnnnnnnnnnnnnnnnnnnnnnnnnnnnnnnnnnnnnnnnnnnnnnnnnnnnnnnnnnnnnnnnnnnnnnnnnnnnnnnnnnnnnnnnnnnnnnnnnnnnnnnnnnnnnnnnnnnnnnnnnnnnnnnnnnnnnnnnnnnnnnnnnnnnnnnnnnnnnnnnnnnnnnnnnnnnnnnnnnnnnnnnnnnnnnnnnnnnnnnnnnnnnnnnnnnnnnnnnnnnnnnnnnnnnnnnnnnnnnnnnnnnnnnnnnnnnnnnnnnnnnnnnnnnnnnnnnnnnnnnnnnnnnnnnnnnnnnnnnnnnnnnnnnnnnnnnnnnnnnnnnnnnnnnnnnnnnnnnnnnnnnnnnnnnnnnnnnnnnnnnnnnnnnnnnnnnnnnnnnnnnnnnnnnnnnnnnnnnnnnnnnnnnnnnnnnnnnnnnnnnnnnnnnnnnnnnnnnnnnnnnnnnnnnnnnnnnnnnnnnnnnnnnnnnnnnnnnnnnnnnnnnnnnnnnnnnnnnnnnnnnnnnnnnnnnnnnnnnnnnnnnnnnnnnnnnnnnnnnnnnnnnnnnnnnnnnnnnnnnnnnnnnnnnnnnnnnnnnnnnnnnnnnnnnnnnnnnnnnnnnnnnnnnnnnnnnnnnnnnnnnnnnnnnnnnnnnnnnnnnnnnnnnnnnnnnnnnnnnnnnnnnnnnnnnnnnnnnnnnnnnnnnnnnnnnnnnnnnnnnnnnnnnnnnnnnnnnnnnnnnnnnnnnnnnnnnnnnnnnnnnnnnnnnnnnnnnnnnnnnnnnnnnnnnnnnnnnnnnnnnnnnnnnnnnnnnnnnnnnnnnnnnnnnnnnnnnnnnnnnnnnnnnnnnnnnnnnnnnnnnnnnnnnnnnnnnnnnnnnnnnnnnnnnnnnnnnnnnnnnnnnnnnnnnnnnnnnnnnnnnnnnnnnnnnnnnnnnnnnnnnnnnnnnnnnnnnnnnnnnnnnnnnnnnnnnnnnnnnnnnnnnnnnnnnnnnnnnnnnnnnnnnnnnnnnnnnnnnnnnnnnnnnnnnnnnnnnnnnnnnnnnnnnnnnnnnnnnnnnnnnnnnnnnnnnnnnnnnnnnnnnnnnnnnnnnnnnnnnnnnnnnnnnnnnnnnnnnnnnnnnnnnnnnnnnnnnnnnnnnnnnnnnnnnnnnnnnnnnnnnnnnnnnnnnnnnnnnnnnnnnnnnnnnnnnnnnnnnnnnnnnnnnnnnnnnnnnnnnnnnnnnnnnnnnnnnnnnnnnnnnnnnnnnnnnnnnnnnnnnnnnnnnnnnnnnnnnnnnnnnnnnnnnnnnnnnnnnnnnnnnnnnnnnnnnnnnnnnnnnnnnnnnnnnnnnnnnnnnnnnnnnnnnnnnnnnnnnnnnnnnnnnnnnnnnnnnnnnnnnnnnnnnnnnnnnnnnnnnnnnnnnnnnnnnnnnnnnnnnnnnnnnnnnnnnnnnnnnnnnnnnnnnnnnnnnnnnnnnnnnnnnnnnnnnnnnnnnnnnnnnnnnnnnnnnnnnnnnnnnnnnnnnnnnnnnnnnnnnnnnnnnnnnnnnnnnnnnnnnnnnnnnnnnnnnnnnnnnnnnnnnnnnnnnnnnnnnnnnnnnnnnnnnnnnnnnnnnnnnnnnnnnnnnnnnnnnnnnnnnnnnnnnnnnnnnnnnnnnnnnnnnnnnnnnnnnnnnnnnnnnnnnnnnnnnnnnnnnnnnnnnnnnnnnnnnnnnnnnnnnnnnnnnnnnnnnnnnnnnnnnnnnnnnnnnnnnnnnnnnnnnnnnnnnnnnnnnnnnnnnnnnnnnnnnnnnnnnnnnnnnnnnnnnnnnnnnnnnnnnnnnnnnnnnnnnnnnnnnnnnnnnnnnnnnnnnnnnnnnnnnnnnnnnnnnnnnnnnnnnnnnnnnnnnnnnnnnnnnnnnnnnnnnnnnnnnnnnnnnnnnnnnnnnnnnnnnnnnnnnnnnnnnnnnnnnnnnnnnnnnnnnnnnnnnnnnnnnnnnnnnnnnnnnnnnnnnnnnnnnnnnnnnnnnnnnnnnnnnnnnnnnnnnnnnnnnnnnnnnnnnnnnnnnnnnnnnnnnnnnnnnnnnnnnnnnnnnnnnnnnnnnnnnnnnnnnnnnnnnnnnnnnnnnnnnnnnnnnnnnnnnnnnnnnnnnnnnnnnnnnnnnnnnnnnnnnnnnnnnnnnnnnnnnnnnnnnnnnnnnnnnnnnnnnnnnnnnnnnnnnnnnnnnnnnnnnnnnnnnnnnnnnnnnnnnnnnnnnnnnnnnnnnnnnnnnnnnnnnnnnnnnnnnnnnnnnnnnnnnnnnnnnnnnnnnnnnnnnnnnnnnnnnnnnnnnnnnnnnnnnnnnnnnnnnnnnnnnnnnnnnnnnnnnnnnnnnnnnnnnnnnnnnnnnnnnnnnnnnnnnnnnnnnnnnnnnnnnnnnnnnnnnnnnnnnnnnnnnnnnnnnnnnnnnnnnnnnnnnnnnnnnnnnnnnnnnnnnnnnnnnnnnnnnnnnnnnnnnnnnnnnnnnnnnnnnnnnnnnnnnnnnnnnnnnnnnnnnnnnnnnnnnnnnnnnnnnnnnnnnnnnnnnnnnnnnnnnnnnnnnnnnnnnnnnnnnnnnnnnnnnnnnnnnnnnnnnnnnnnnnnnnnnnnnnnnnnnnnnnnnnnnnnnnnnnnnnnnnnnnnnnnnnnnnnnnnnnnnnnnnnnnnnnnnnnnnnnnnnnnnnnnnnnnnnnnnnnnnnnnnnnnnnnnnnnnnnnnnnnnnnnnnnnnnnnnnnnnnnnnnnnnnnnnnnnnnnnnnnnnnnnnnnnnnnnnnnnnnnnnnnnnnnnnnnnnnnnnnnnnnnnnnnnnnnnnnnnnnnnnnnnnnnnnnnnnnnnnnnnnnnnnnnnnnnnnnnnnnnnnnnnnnnnnnnnnnnnnnnnnnnnnnnnnnnnnnnnnnnnnnnnnnnnnnnnnnnnnnnnnnnnnnnnnnnnnnnnnnnnnnnnnnnnnnnnnnnnnnnnnnnnnnnnnnnnnnnnnnnnnnnnnnnnnnnnnnnnnnnnnnnnnnnnnnnnnnnnnnnnnnnnnnnnnnnnnnnnnnnnnnnnnnnnnnnnnnnnnnnnnnnnnnnnnnnnnnnnnnnnnnnnnnnnnnnnnnnnnnnnnnnnnnnnnnnnnnnnnnnnnnnnnnnnnnnnnnnnnnnnnnnnnnnnnnnnnnnnnnnnnnnnnnnnnnnnnnnnnnnnnnnnnnnnnnnnnnnnnnnnnnnnnnnnnnnnnnnnnnnnnnnnnnnnnnnnnnnnnnnnnnnnnnnnnnnnnnnnnnnnnnnnnnnnnnnnnnnnnnnnnnnnnnnnnnnnnnnnnnnnnnnnnnnnnnnnnnnnnnnnnnnnnnnnnnnnnnnnnnnnnnnnnnnnnnnnnnnnnnnnnnnnnnnnnnnnnnnnnnnnnnnnnnnnnnnnnnnnnnnnnnnnnnnnnnnnnnnnnnnnnnnnnnnnnnnnnnnnnnnnnnnnnnnnnnnnnnnnnnnnnnnnnnnnnnnnnnnnnnnnnnnnnnnnnnnnnnnnnnnnnnnnnnnnnnnnnnnnnnnnnnnnnnnnnnnnnnnnnnnnnnnnnnnnnnnnnnnnnnnnnnnnnnnnnnnnnnnnnnnnnnnnnnnnnnnnnnnnnnnnnnnnnnnnnnnnnnnnnnnnnnnnnnnnnnnnnnnnnnnnnnnnnnnnnnnnnnnnnnnnnnnnnnnnnnnnnnnnnnnnnnnnnnnnnnnnnnnnnnnnnnnnnnnnnnnnnnnnnnnnnnnnnnnnnnnnnnnnnnnnnnnnnnnnnnnnnnnnnnnnnnnnnnnnnnnnnnnnnnnnnnnnnnnnnnnnnnnnnnnnnnnnnnnnnnnnnnnnnnnnnnnnnnnnnnnnnnnnnnnnnnnnnnnnnnnnnnnnnnnnnnnnnnnnnnnnnnnnnnnnnnnnnnnnnnnnnnnnnnnnnnnnnnnnnnnnnnnnnnnnnnnnnnnnnnnnnnnnnnnnnnnnnnnnnnnnnnnnnnnnnnnnnnnnnnnnnnnnnnnnnnnnnnnnnnnnnnnnnnnnnnnnnnnnnnnnnnnnnnnnnnnnnnnnnnnnnnnnnnnnnnnnnnnnnnnnnnnnnnnnnnnnnnnnnnnnnnnnnnnnnnnnnnnnnnnnnnnnnnnnnnnnnnnnnnnnnnnnnnnnnnnnnnnnnnnnnnnnnnnnnnnnnnnnnnnnnnnnnnnnnnnnnnnnnnnnnnnnnnnnnnnnnnnnnnnnnnnnnnnnnnnnnnnnnnnnnnnnnnnnnnnnnnnnnnnnnnnnnnnnnnnnnnnnnnnnnnnnnnnnnnnnnnnnnnnnnnnnnnnnnnnnnnnnnnnnnnnnnnnnnnnnnnnnnnnnnnnnnnnnnnnnnnnnnnnnnnnnnnnnnnnnnnnnnnnnnnnnnnnnnnnnnnnnnnnnnnnnnnnnnnnnnnnnnnnnnnnnnnnnnnnnnnnnnnnnnnnnnnnnnnnnnnnnnnnnnnnnnnnnnnnnnnnnnnnnnnnnnnnnnnnnnnnnnnnnnnnnnnnnnnnnnnnnnnnnnnnnnnnnnnnnnnnnnnnnnnnnnnnnnnnnnnnnnnnnnnnnnnnnnnnnnnnnnnnnnnnnnnnnnnnnnnnnnnnnnnnnnnnnnnnnnnnnnnnnnnnnnnnnnnnnnnnnnnnnnnnnnnnnnnnnnnnnnnnnnnnnnnnnnnnnnnnnnnnnnnnnnnnnnnnnnnnnnnnnnnnnnnnnnnnnnnnnnnnnnnnnnnnnnnnnnnnnnnnnnnnnnnnnnnnnnnnnnnnnnnnnnnnnnnnnnnnnnnnnnnnnnnnnnnnnnnnnnnnnnnnnnnnnnnnnnnnnnnnnnnnnnnnnnnnnnnnnnnnnnnnnnnnnnnnnnnnnnnnnnnnnnnnnnnnnnnnnnnnnnnnnnnnnnnnnnnnnnnnnnnnnnnnnnnnnnnnnnnnnnnnnnnnnnnnnnnnnnnnnnnnnnnnnnnnnnnnnnnnnnnnnnnnnnnnnnnnnnnnnnnnnnnnnnnnnnnnnnnnnnnnnnnnnnnnnnnnnnnnnnnnnnnnnnnnnnnnnnnnnnnnnnnnnnnnnnnnnnnnnnnnnnnnnnnnnnnnnnnnnnnnnnnnnnnnnnnnnnnnnnnnnnnnnnnnnnnnnnnnnnnnnnnnnnnnnnnnnnnnnnnnnnnnnnnnnnnnnnnnnnnnnnnnnnnnnnnnnnnnnnnnnnnnnnnnnnnnnnnnnnnnnnnnnnnnnnnnnnnnnnnnnnnnnnnnnnnnnnnnnnnnnnnnnnnnnnnnnnnnnnnnnnnnnnnnnnnnnnnnnnnnnnnnnnnnnnnnnnnnnnnnnnnnnnnnnnnnnnnnnnnnnnnnnnnnnnnnnnnnnnnnnnnnnnnnnnnnnnnnnnnnnnnnnnnnnnnnnnnnnnnnnnnnnnnnnnnnnnnnnnnnnnnnnnnnnnnnnnnnnnnnnnnnnnnnnnnnnnnnnnnnnnnnnnnnnnnnnnnnnnnnnnnnnnnnnnnnnnnnnnnnnnnnnnnnnnnnnnnnnnnnnnnnnnnnnnnnnnnnnnnnnnnnnnnnnnnnnnnnnnnnnnnnnnnnnnnnnnnnnnnnnnnnnnnnnnnnnnnnnnnnnnnnnnnnnnnnnnnnnnnnnnnnnnnnnnnnnnnnnnnnnnnnnnnnnnnnnnnnnnnnnnnnnnnnnnnnnnnnnnnnnnnnnnnnnnnnnnnnnnnnnnnnnnnnnnnnnnnnnnnnnnnnnnnnnnnnnnnnnnnnnnnnnnnnnnnnnnnnnnnnnnnnnnnnnnnnnnnnnnnnnnnnnnnnnnnnnnnnnnnnnnnnnnnnnnnnnnnnnnnnnnnnnnnnnnnnnnnnnnnnnnnnnnnnnnnnnnnnnnnnnnnnnnnnnnnnnnnnnnnnnnnnnnnnnnnnnnnnnnnnnnnnnnnnnnnnnnnnnnnnnnnnnnnnnnnnnnnnnnnnnnnnnnnnnnnnnnnnnnnnnnnnnnnnnnnnnnnnnnnnnnnnnnnnnnnnnnnnnnnnnnnnnnnnnnnnnnnnnnnnnnnnnnnnnnnnnnnnnnnnnnnnnnnnnnnnnnnnnnnnnnnnnnnnnnnnnnnnnnnnnnnnnnnnnnnnnnnnnnnnnnnnnnnnnnnnnnnnnnnnnnnnnnnnnnnnnnnnnnnnnnnnnnnnnnnnnnnnnnnnnnnnnnnnnnnnnnnnnnnnnnnnnnnnnnnnnnnnnnnnnnnnnnnnnnnnnnnnnnnnnnnnnnnnnnnnnnnnnnnnnnnnnnnnnnnnnnnnnnnnnnnnnnnnnnnnnnnnnnnnnnnnnnnnnnnnnnnnnnnnnnnnnnnnnnnnnnnnnnnnnnnnnnnnnnnnnnnnnnnnnnnnnnnnnnnnnnnnnnnnnnnnnnnnnnnnnnnnnnnnnnnnnnnnnnnnnnnnnnnnnnnnnnnnnnnnnnnnnnnnnnnnnnnnnnnnnnnnnnnnnnnnnnnnnnnnnnnnnnnnnnnnnnnnnnnnnnnnnnnnnnnnnnnnnnnnnnnnnnnnnnnnnnnnnnnnnnnnnnnnnnnnnnnnnnnnnnnnnnnnnnnnnnnnnnnnnnnnnnnnnnnnnnnnnnnnnnnnnnnnnnnnnnnnnnnnnnnnnnnnnnnnnnnnnnnnnnnnnnnnnnnnnnnnnnnnnnnnnnnnnnnnnnnnnnnnnnnnnnnnnnnnnnnnnnnnnnnnnnnnnnnnnnnnnnnnnnnnnnnnnnnnnnnnnnnnnnnnnnnnnnnnnnnnnnnnnnnnnnnnnnnnnnnnnnnnnnnnnnnnnnnnnnnnnnnnnnnnnnnnnnnnnnnnnnnnnnnnnnnnnnnnnnnnnnnnnnnnnnnnnnnnnnnnnnnnnnnnnnnnnnnnnnnnnnnnnnnnnnnnnnnnnnnnnnnnnnnnnnnnnnnnnnnnnnnnnnnnnnnnnnnnnnnnnnnnnnnnnnnnnnnnnnnnnnnnnnnnnnnnnnnnnnnnnnnnnnnnnnnnnnnnnnnnnnnnnnnnnnnnnnnnnnnnnnnnnnnnnnnnnnnnnnnnnnnnnnnnnnnnnnnnnnnnnnnnnnnnnnnnnnnnnnnnnnnnnnnnnnnnnnnnnnnnnnnnnnnnnnnnnnnnnnnnnnnnnnnnnnnnnnnnnnnnnnnnnnnnnnnnnnnnnnnnnnnnnnnnnnnnnnnnnnnnnnnnnnnnnnnnnnnnnnnnnnnnnnnnnnnnnnnnnnnnnnnnnnnnnnnnnnnnnnnnnnnnnnnnnnnnnnnnnnnnnnnnnnnnnnnnnnnnnnnnnnnnnnnnnnnnnnnnnnnnnnnnnnnnnnnnnnnnnnnnnnnnnnnnnnnnnnnnnnnnnnnnnnnnnnnnnnnnnnnnnnnnnnnnnnnnnnnnnnnnnnnnnnnnnnnnnnnnnnnnnnnnnnnnnnnnnnnnnnnnnnnnnnnnnnnnnnnnnnnnnnnnnnnnnnnnnnnnnnnnnnnnnnnnnnnnnnnnnnnnnnnnnnnnnnnnnnnnnnnnnnnnnnnnnnnnnnnnnnnnnnnnnnnnnnnnnnnnnnnnnnnnnnnnnnnnnnnnnnnnnnnnnnnnnnnnnnnnnnnnnnnnnnnnnnnnnnnnnnnnnnnnnnnnnnnnnnnnnnnnnnnnnnnnnnnnnnnnnnnnnnnnnnnnnnnnnnnnnnnnnnnnnnnnnnnnnnnnnnnnnnnnnnnnnnnnnnnnnnnnnnnnnnnnnnnnnnnnnnnnnnnnnnnnnnnnnnnnnnnnnnnnnnnnnnnnnnnnnnnnnnnnnnnnnnnnnnnnnnnnnnnnnnnnnnnnnnnnnnnnnnnnnnnnnnnnnnnnnnnnnnnnnnnnnnnnnnnnnnnnnnnnnnnnnnnnnnnnnnnnnnnnnnnnnnnnnnnnnnnnnnnnnnnnnnnnnnnnnnnnnnnnnnnnnnnnnnnnnnnnnnnnnnnnnnnnnnnnnnnnnnnnnnnnnnnnnnnnnnnnnnnnnnnnnnnnnnnnnnnnnnnnnnnnnnnnnnnnnnnnnnnnnnnnnnnnnnnnnnnnnnnnnnnnnnnnnnnnnnnnnnnnnnnnnnnnnnnnnnnnnnnnnnnnnnnnnnnnnnnnnnnnnnnnnnnnnnnnnnnnnnnnnnnnnnnnnnnnnnnnnnnnnnnnnnnnnnnnnnnnnnnnnnnnnnnnnnnnnnnnnnnnnnnnnnnnnnnnnnnnnnnnnnnnnnnnnnnnnnnnnnnnnnnnnnnnnnnnnnnnnnnnnnnnnnnnnnnnnnnnnnnnnnnnnnnnnnnnnnnnnnnnnnnnnnnnnnnnnnnnnnnnnnnnnnnnnnnnnnnnnnnnnnnnnnnnnnnnnnnnnnnnnnnnnnnnnnnnnnnnnnnnnnnnnnnnnnnnnnnnnnnnnnnnnnnnnnnnnnnnnnnnnnnnnnnnnnnnnnnnnnnnnnnnnnnnnnnnnnnnnnnnnnnnnnnnnnnnnnnnnnnnnnnnnnnnnnnnnnnnnnnnnnnnnnnnnnnnnnnnnnnnnnnnnnnnnnnnnnnnnnnnnnnnnnnnnnnnnnnnnnnnnnnnnnnnnnnnnnnnnnnnnnnnnnnnnnnnnnnnnnnnnnnnnnnnnnnnnnnnnnnnnnnnnnnnnnnnnnnnnnnnnnnnnnnnnnnnnnnnnnnnnnnnnnnnnnnnnnnnnnnnnnnnnnnnnnnnnnnnnnnnnnnnnnnnnnnnnnnnnnnnnnnnnnnnnnnnnnnnnnnnnnnnnnnnnnnnnnnnnnnnnnnnnnnnnnnnnnnnnnnnnnnnnnnnnnnnnnnnnnnnnnnnnnnnnnnnnnnnnnnnnnnnnnnnnnnnnnnnnnnnnnnnnnnnnnnnnnnnnnnnnnnnnnnnnnnnnnnnnnnnnnnnnnnnnnnnnnnnnnnnnnnnnnnnnnnnnnnnnnnnnnnnnnnnnnnnnnnnnnnnnnnnnnnnnnnnnnnnnnnnnnnnnnnnnnnnnnnnnnnnnnnnnnnnnnnnnnnnnnnnnnnnnnnnnnnnnnnnnnnnnnnnnnnnnnnnnnnnnnnnnnnnnnnnnnnnnnnnnnnnnnnnnnnnnnnnnnnnnnnnnnnnnnnnnnnnnnnnnnnnnnnnnnnnnnnnnnnnnnnnnnnnnnnnnnnnnnnnnnnnnnnnnnnnnnnnnnnnnnnnnnnnnnnnnnnnnnnnnnnnnnnnnnnnnnnnnnnnnnnnnnnnnnnnnnnnnnnnnnnnnnnnnnnnnnnnnnnnnnnnnnnnnnnnnnnnnnnnnnnnnnnnnnnnnnnnnnnnnnnnnnnnnnnnnnnnnnnnnnnnnnnnnnnnnnnnnnnnnnnnnnnnnnnnnnnnnnnnnnnnnnnnnnnnnnnnnnnnnnnnnnnnnnnnnnnnnnnnnnnnnnnnnnnnnnnnnnnnnnnnnnnnnnnnnnnnnnnnnnnnnnnnnnnnnnnnnnnnnnnnnnnnnnnnnnnnnnnnnnnnnnnnnnnnnnnnnnnnnnnnnnnnnnnnnnnnnnnnnnnnnnnnnnnnnnnnnnnnnnnnnnnnnnnnnnnnnnnnnnnnnnnnnnnnnnnnnnnnnnnnnnnnnnnnnnnnnnnnnnnnnnnnnnnnnnnnnnnnnnnnnnnnnnnnnnnnnnnnnnnnnnnnnnnnnnnnnnnnnnnnnnnnnnnnnnnnnnnnnnnnnnnnnnnnnnnnnnnnnnnnnnnnnnnnnnnnnnnnnnnnnnnnnnnnnnnnnnnnnnnnnnnnnnnnnnnnnnnnnnnnnnnnnnnnnnnnnnnnnnnnnnnnnnnnnnnnnnnnnnnnnnnnnnnnnnnnnnnnnnnnnnnnnnnnnnnnnnnnnnnnnnnnnnnnnnnnnnnnnnnnnnnnnnnnnnnnnnnnnnnnnnnnnnnnnnnnnnnnnnnnnnnnnnnnnnnnnnnnnnnnnnnnnnnnnnnnnnnnnnnnnnnnnnnnnnnnnnnnnnnnnnnnnnnnnnnnnnnnnnnnnnnnnnnnnnnnnnnnnnnnnnnnnnnnnnnnnnnnnnnnnnnnnnnnnnnnnnnnnnnnnnnnnnnnnnnnnnnnnnnnnnnnnnnnnnnnnnnnnnnnnnnnnnnnnnnnnnnnnnnnnnnnnnnnnnnnnnnnnnnnnnnnnnnnnnnnnnnnnnnnnnnnnnnnnnnnnnnnnnnnnnnnnnnnnnnnnnnnnnnnnnnnnnnnnnnnnnnnnnnnnnnnnnnnnnnnnnnnnnnnnnnnnnnnnnnnnnnnnnnnnnnnnnnnnnnnnnnnnnnnnnnnnnnnnnnnnnnnnnnnnnnnnnnnnnnnnnnnnnnnnnnnnnnnnnnnnnnnnnnnnnnnnnnnnnnnnnnnnnnnnnnnnnnnnnnnnnnnnnnnnnnnnnnnnnnnnnnnnnnnnnnnnnnnnnnnnnnnnnnnnnnnnnnnnnnnnnnnnnnnnnnnnnnnnnnnnnnnnnnnnnnnnnnnnnnnnnnnnnnnnnnnnnnnnnnnnnnnnnnnnnnnnnnnnnnnnnnnnnnnnnnnnnnnnnnnnnnnnnnnnnnnnnnnnnnnnnnnnnnnnnnnnnnnnnnnnnnnnnnnnnnnnnnnnnnnnnnnnnnnnnnnnnnnnnnnnnnnnnnnnnnnnnnnnnnnnnnnnnnnnnnnnnnnnnnnnnnnnnnnnnnnnnnnnnnnnnnnnnnnnnnnnnnnnnnnnnnnnnnnnnnnnnnnnnnnnnnnnnnnnnnnnnnnnnnnnnnnnnnnnnnnnnnnnnnnnnnnnnnnnnnnnnnnnnnnnnnnnnnnnnnnnnnnnnnnnnnnnnnnnnnnnnnnnnnnnnnnnnnnnnnnnnnnnnnnnnnnnnnnnnnnnnnnnnnnnnnnnnnnnnnnnnnnnnnnnnnnnnnnnnnnnnnnnnnnnnnnnnnnnnnnnnnnnnnnnnnnnnnnnnnnnnnnnnnnnnnnnnnnnnnnnnnnnnnnnnnnnnnnnnnnnnnnnnnnnnnnnnnnnnnnnnnnnnnnnnnnnnnnnnnnnnnnnnnnnnnnnnnnnnnnnnnnnnnnnnnnnnnnnnnnnnnnnnnnnnnnnnnnnnnnnnnnnnnnnnnnnnnnnnnnnnnnnnnnnnnnnnnnnnnnnnnnnnnnnnnnnnnnnnnnnnnnnnnnnnnnnnnnnnnnnnnnnnnnnnnnnnnnnnnnnnnnnnnnnnnnnnnnnnnnnnnnnnnnnnnnnnnnnnnnnnnnnnnnnnnnnnnnnnnnnnnnnnnnnnnnnnnnnnnnnnnnnnnnnnnnnnnnnnnnnnnnnnnnnnnnnnnnnnnnnnnnnnnnnnnnnnnnnnnnnnnnnnnnnnnnnnnnnnnnnnnnnnnnnnnnnnnnnnnnnnnnnnnnnnnnnnnnnnnnnnnnnnnnnnnnnnnnnnnnnnnnnnnnnnnnnnnnnnnnnnnnnnnnnnnnnnnnnnnnnnnnnnnnnnnnnnnnnnnnnnnnnnnnnnnnnnnnnnnnnnnnnnnnnnnnnnnnnnnnnnnnnnnnnnnnnnnnnnnnnnnnnnnnnnnnnnnnnnnnnnnnnnnnnnnnnnnnnnnnnnnnnnnnnnnnnnnnnnnnnnnnnnnnnnnnnnnnnnnnnnnnnnnnnnnnnnnnnnnnnnnnnnnnnnnnnnnnnnnnnnnnnnnnnnnnnnnnnnnnnnnnnnnnnnnnnnnnnnnnnnnnnnnnnnnnnnnnnnnnnnnnnnnnnnnnnnnnnnnnnnnnnnnnnnnnnnnnnnnnnnnnnnnnnnnnnnnnnnnnnnnnnnnnnnnnnnnnnnnnnnnnnnnnnnnnnnnnnnnnnnnnnnnnnnnnnnnnnnnnnnnnnnnnnnnnnnnnnnnnnnnnnnnnnnnnnnnnnnnnnnnnnnnnnnnnnnnnnnnnnnnnnnnnnnnnnnnnnnnnnnnnnnnnnnnnnnnnnnnnnnnnnnnnnnnnnnnnnnnnnnnnnnnnnnnnnnnnnnnnnnnnnnnnnnnnnnnnnnnnnnnnnnnnnnnnnnnnnnnnnnnnnnnnnnnnnnnnnnnnnnnnnnnnnnnnnnnnnnnnnnnnnnnnnnnnnnnnnnnnnnnnnnnnnnnnnnnnnnnnnnnnnnnnnnnnnnnnnnnnnnnnnnnnnnnnnnnnnnnnnnnnnnnnnnnnnnnnnnnnnnnnnnnnnnnnnnnnnnnnnnnnnnnnnnnnnnnnnnnnnnnnnnnnnnnnnnnnnnnnnnnnnnnnnnnnnnnnnnnnnnnnnnnnnnnnnnnnnnnnnnnnnnnnnnnnnnnnnnnnnnnnnnnnnnnnnnnnnnnnnnnnnnnnnnnnnnnnnnnnnnnnnnnnnnnnnnnnnnnnnnnnnnnnnnnnnnnnnnnnnnnnnnnnnnnnnnnnnnnnnnnnnnnnnnnnnnnnnnnnnnnnnnnnnnnnnnnnnnnnnnnnnnnnnnnnnnnnnnnnnnnnnnnnnnnnnnnnnnnnnnnnnnnnnnnnnnnnnnnnnnnnnnnnnnnnnnnnnnnnnnnnnnnnnnnnnnnnnnnnnnnnnnnnnnnnnnnnnnnnnnnnnnnnnnnnnnnnnnnnnnnnnnnnnnnnnnnnnnnnnnnnnnnnnnnnnnnnnnnnnnnnnnnnnnnnnnnnnnnnnnnnnnnnnnnnnnnnnnnnnnnnnnnnnnnnnnnnnnnnnnnnnnnnnnnnnnnnnnnnnnnnnnnnnnnnnnnnnnnnnnnnnnnnnnnnnnnnnnnnnnnnnnnnnnnnnnnnnnnnnnnnnnnnnnnnnnnnnnnnnnnnnnnnnnnnnnnnnnnnnnnnnnnnnnnnnnnnnnnnnnnnnnnnnnnnnnnnnnnnnnnnnnnnnnnnnnnnnnnnnnnnnnnnnnnnnnnnnnnnnnnnnnnnnnnnnnnnnnnnnnnnnnnnnnnnnnnnnnnnnnnnnnnnnnnnnnnnnnnnnnnnnnnnnnnnnnnnnnnnnnnnnnnnnnnnnnnnnnnnnnnnnnnnnnnnnnnnnnnnnnnnnnnnnnnnnnnnnnnnnnnnnnnnnnnnnnnnnnnnnnnnnnnnnnnnnnnnnnnnnnnnnnnnnnnnnnnnnnnnnnnnnnnnnnnnnnnnnnnnnnnnnnnnnnnnnnnnnnnnnnnnnnnnnnnnnnnnnnnnnnnnnnnnnnnnnnnnnnnnnnnnnnnnnnnnnnnnnnnnnnnnnnnnnnnnnnnnnnnnnnnnnnnnnnnnnnnnnnnnnnnnnnnnnnnnnnnnnnnnnnnnnnnnnnnnnnnnnnnnnnnnnnnnnnnnnnnnnnnnnnnnnnnnnnnnnnnnnnnnnnnnnnnnnnnnnnnnnnnnnnnnnnnnnnnnnnnnnnnnnnnnnnnnnnnnnnnnnnnnnnnnnnnnnnnnnnnnnnnnnnnnnnnnnnnnnnnnnnnnnnnnnnnnnnnnnnnnnnnnnnnnnnnnnnnnnnnnnnnnnnnnnnnnnnnnnnnnnnnnnnnnnnnnnnnnnnnnnnnnnnnnnnnnnnnnnnnnnnnnnnnnnnnnnnnnnnnnnnnnnnnnnnnnnnnnnnnnnnnnnnnnnnnnnnnnnnnnnnnnnnnnnnnnnnnnnnnnnnnnnnnnnnnnnnnnnnnnnnnnnnnnnnnnnnnnnnnnnnnnnnnnnnnnnnnnnnnnnnnnnnnnnnnnnnnnnnnnnnnnnnnnnnnnnnnnnnnnnnnnnnnnnnnnnnnnnnnnnnnnnnnnnnnnnnnnnnnnnnnnnnnnnnnnnnnnnnnnnnnnnnnnnnnnnnnnnnnnnnnnnnnnnnnnnnnnnnnnnnnnnnnnnnnnnnnnnnnnnnnnnnnnnnnnnnnnnnnnnnnnnnnnnnnnnnnnnnnnnnnnnnnnnnnnnnnnnnnnnnnnnnnnnnnnnnnnnnnnnnnnnnnnnnnnnnnnnnnnnnnnnnnnnnnnnnnnnnnnnnnnnnnnnnnnnnnnnnnnnnnnnnnnnnnnnnnnnnnnnnnnnnnnnnnnnnnnnnnnnnnnnnnnnnnnnnnnnnnnnnnnnnnnnnnnnnnnnnnnnnnnnnnnnnnnnnnnnnnnnnnnnnnnnnnnnnnnnnnnnnnnnnnnnnnnnnnnnnnnnnnnnnnnnnnnnnnnnnnnnnnnnnnnnnnnnnnnnnnnnnnnnnnnnnnnnnnnnnnnnnnnnnnnnnnnnnnnnnnnnnnnnnnnnnnnnnnnnnnnnnnnnnnnnnnnnnnnnnnnnnnnnnnnnnnnnnnnnnnnnnnnnnnnnnnnnnnnnnnnnnnnnnnnnnnnnnnnnnnnnnnnnnnnnnnnnnnnnnnnnnnnnnnnnnnnnnnnnnnnnnnnnnnnnnnnnnnnnnnnnnnnnnnnnnnnnnnnnnnnnnnnnnnnnnnnnnnnnnnnnnnnnnnnnnnnnnnnnnnnnnnnnnnnnnnnnnnnnnnnnnnnnnnnnnnnnnnnnnnnnnnnnnnnnnnnnnnnnnnnnnnnnnnnnnnnnnnnnnnnnnnnnnnnnnnnnnnnnnnnnnnnnnnnnnnnnnnnnnnnnnnnnnnnnnnnnnnnnnnnnnnnnnnnnnnnnnnnnnnnnnnnnnnnnnnnnnnnnnnnnnnnnnnnnnnnnnnnnnnnnnnnnnnnnnnnnnnnnnnnnnnnnnnnnnnnnnnnnnnnnnnnnnnnnnnnnnnnnnnnnnnnnnnnnnnnnnnnnnnnnnnnnnnnnnnnnnnnnnnnnnnnnnnnnnnnnnnnnnnnnnnnnnnnnnnnnnnnnnnnnnnnnnnnnnnnnnnnnnnnnnnnnnnnnnnnnnnnnnnnnnnnnnnnnnnnnnnnnnnnnnnnnnnnnnnnnnnnnnnnnnnnnnnnnnnnnnnnnnnnnnnnnnnnnnnnnnnnnnnnnnnnnnnnnnnnnnnnnnnnnnnnnnnnnnnnnnnnnnnnnnnnnnnnnnnnnnnnnnnnnnnnnnnnnnnnnnnnnnnnnnnnnnnnnnnnnnnnnnnnnnnnnnnnnnnnnnnnnnnnnnnnnnnnnnnnnnnnnnnnnnnnnnnnnnnnnnnnnnnnnnnnnnnnnnnnnnnnnnnnnnnnnnnnnnnnnnnnnnnnnnnnnnnnnnnnnnnnnnnnnnnnnnnnnnnnnnnnnnnnnnnnnnnnnnnnnnnnnnnnnnnnnnnnnnnnnnnnnnnnnnnnnnnnnnnnnnnnnnnnnnnnnnnnnnnnnnnnnnnnnnnnnnnnnnnnnnnnnnnnnnnnnnnnnnnnnnnnnnnnnnnnnnnnnnnnnnnnnnnnnnnnnnnnnnnnnnnnnnnnnnnnnnnnnnnnnnnnnnnnnnnnnnnnnnnnnnnnnnnnnnnnnnnnnnnnnnnnnnnnnnnnnnnnnnnnnnnnnnnnnnnnnnnnnnnnnnnnnnnnnnnnnnnnnnnnnnnnnnnnnnnnnnnnnnnnnnnnnnnnnnnnnnnnnnnnnnnnnnnnnnnnnnnnnnnnnnnnnnnnnnnnnnnnnnnnnnnnnnnnnnnnnnnnnnnnnnnnnnnnnnnnnnnnnnnnnnnnnnnnnnnnnnnnnnnnnnnnnnnnnnnnnnnnnnnnnnnnnnnnnnnnnnnnnnnnnnnnnnnnnnnnnnnnnnnnnnnnnnnnnnnnnnnnnnnnnnnnnnnnnnnnnnnnnnnnnnnnnnnnnnnnnnnnnnnnnnnnnnnnnnnnnnnnnnnnnnnnnnnnnnnnnnnnnnnnnnnnnnnnnnnnnnnnnnnnnnnnnnnnnnnnnnnnnnnnnnnnnnnnnnnnnnnnnnnnnnnnnnnnnnnnnnnnnnnnnnnnnnnnnnnnnnnnnnnnnnnnnnnnnnnnnnnnnnnnnnnnnnnnnnnnnnnnnnnnnnnnnnnnnnnnnnnnnnnnnnnnnnnnnnnnnnnnnnnnnnnnnnnnnnnnnnnnnnnnnnnnnnnnnnnnnnnnnnnnnnnnnnnnnnnnnnnnnnnnnnnnnnnnnnnnnnnnnnnnnnnnnnnnnnnnnnnnnnnnnnnnnnnnnnnnnnnnnnnnnnnnnnnnnnnnnnnnnnnnnnnnnnnnnnnnnnnnnnnnnnnnnnnnnnnnnnnnnnnnnnnnnnnnnnnnnnnnnnnnnnnnnnnnnnnnnnnnnnnnnnnnnnnnnnnnnnnnnnnnnnnnnnnnnnnnnnnnnnnnnnnnnnnnnnnnnnnnnnnnnnnnnnnnnnnnnnnnnnnnnnnnnnnnnnnnnnnnnnnnnnnnnnnnnnnnnnnnnnnnnnnnnnnnnnnnnnnnnnnnnnnnnnnnnnnnnnnnnnnnnnnnnnnnnnnnnnnnnnnnnnnnnnnnnnnnnnnnnnnnnnnnnnnnnnnnnnnnnnnnnnnnnnnnnnnnnnnnnnnnnnnnnnnnnnnnnnnnnnnnnnnnnnnnnnnnnnnnnnnnnnnnnnnnnnnnnnnnnnnnnnnnnnnnnnnnnnnnnnnnnnnnnnnnnnnnnnnnnnnnnnnnnnnnnnnnnnnnnnnnnnnnnnnnnnnnnnnnnnnnnnnnnnnnnnnnnnnnnnnnnnnnnnnnnnnnnnnnnnnnnnnnnnnnnnnnnnnnnnnnnnnnnnnnnnnnnnnnnnnnnnnnnnnnnnnnnnnnnnnnnnnnnnnnnnnnnnnnnnnnnnnnnnnnnnnnnnnnnnnnnnnnnnnnnnnnnnnnnnnnnnnnnnnnnnnnnnnnnnnnnnnnnnnnnnnnnnnnnnnnnnnnnnnnnnnnnnnnnnnnnnnnnnnnnnnnnnnnnnnnnnnnnnnnnnnnnnnnnnnnnnnnnnnnnnnnnnnnnnnnnnnnnnnnnnnnnnnnnnnnnnnnnnnnnnnnnnnnnnnnnnnnnnnnnnnnnnnnnnnnnnnnnnnnnnnnnnnnnnnnnnnnnnnnnnnnnnnnnnnnnnnnnnnnnnnnnnnnnnnnnnnnnnnnnnnnnnnnnnnnnnnnnnnnnnnnnnnnnnnnnnnnnnnnnnnnnnnnnnnnnnnnnnnnnnnnnnnnnnnnnnnnnnnnnnnnnnnnnnnnnnnnnnnnnnnnnnnnnnnnnnnnnnnnnnnnnnnnnnnnnnnnnnnnnnnnnnnnnnnnnnnnnnnnnnnnnnnnnnnnnnnnnnnnnnnnnnnnnnnnnnnnnnnnnnnnnnnnnnnnnnnnnnnnnnnnnnnnnnnnnnnnnnnnnnnnnnnnnnnnnnnnnnnnnnnnnnnnnnnnnnnnnnnnnnnnnnnnnnnnnnnnnnnnnnnnnnnnnnnnnnnnnnnnnnnnnnnnnnnnnnnnnnnnnnnnnnnnnnnnnnnnnnnnnnnnnnnnnnnnnnnnnnnnnnnnnnnnnnnnnnnnnnnnnnnnnnnnnnnnnnnnnnnnnnnnnnnnnnnnnnnnnnnnnnnnnnnnnnnnnnnnnnnnnnnnnnnnnnnnnnnnnnnnnnnnnnnnnnnnnnnnnnnnnnnnnnnnnnnnnnnnnnnnnnnnnnnnnnnnnnnnnnnnnnnnnnnnnnnnnnnnnnnnnnnnnnnnnnnnnnnnnnnnnnnnnnnnnnnnnnnnnnnnnnnnnnnnnnnnnnnnnnnnnnnnnnnnnnnnnnnnnnnnnnnnnnnnnnnnnnnnnnnnnnnnnnnnnnnnnnnnnnnnnnnnnnnnnnnnnnnnnnnnnnnnnnnnnnnnnnnnnnnnnnnnnnnnnnnnnnnnnnnnnnnnnnnnnnnnnnnnnnnnnnnnnnnnnnnnnnnnnnnnnnnnnnnnnnnnnnnnnnnnnnnnnnnnnnnnnnnnnnnnnnnnnnnnnnnnnnnnnnnnnnnnnnnnnnnnnnnnnnnnnnnnnnnnnnnnnnnnnnnnnnnnnnnnnnnnnnnnnnnnnnnnnnnnnnnnnnnnnnnnnnnnnnnnnnnnnnnnnnnnnnnnnnnnnnnnnnnnnnnnnnnnnnnnnnnnnnnnnnnnnnnnnnnnnnnnnnnnnnnnnnnnnnnnnnnnnnnnnnnnnnnnnnnnnnnnnnnnnnnnnnnnnnnnnnnnnnnnnnnnnnnnnnnnnnnnnnnnnnnnnnnnnnnnnnnnnnnnnnnnnnnnnnnnnnnnnnnnnnnnnnnnnnnnnnnnnnnnnnnnnnnnnnnnnnnnnnnnnnnnnnnnnnnnnnnnnnnnnnnnnnnnnnnnnnnnnnnnnnnnnnnnnnnnnnnnnnnnnnnnnnnnnnnnnnnnnnnnnnnnnnnnnnnnnnnnnnnnnnnnnnnnnnnnnnnnnnnnnnnnnnnnnnnnnnnnnnnnnnnnnnnnnnnnnnnnnnnnnnnnnnnnnnnnnnnnnnnnnnnnnnnnnnnnnnnnnnnnnnnnnnnnnnnnnnnnnnnnnnnnnnnnnnnnnnnnnnnnnnnnnnnnnnnnnnnnnnnnnnnnnnnnnnnnnnnnnnnnnnnnnnnnnnnnnnnnnnnnnnnnnnnnnnnnnnnnnnnnnnnnnnnnnnnnnnnnnnnnnnnnnnnnnnnnnnnnnnnnnnnnnnnnnnnnnnnnnnnnnnnnnnnnnnnnnnnnnnnnnnnnnnnnnnnnnnnnnnnnnnnnnnnnnnnnnnnnnnnnnnnnnnnnnnnnnnnnnnnnnnnnnnnnnnnnnnnnnnnnnnnnnnnnnnnnnnnnnnnnnnnnnnnnnnnnnnnnnnnnnnnnnnnnnnnnnnnnnnnnnnnnnnnnnnnnnnnnnnnnnnnnnnnnnnnnnnnnnnnnnnnnnnnnnnnnnnnnnnnnnnnnnnnnnnnnnnnnnnnnnnnnnnnnnnnnnnnnnnnnnnnnnnnnnnnnnnnnnnnnnnnnnnnnnnnnnnnnnnnnnnnnnnnnnnnnnnnnnnnnnnnnnnnnnnnnnnnnnnnnnnnnnnnnnnnnnnnnnnnnnnnnnnnnnnnnnnnnnnnnnnnnnnnnnnnnnnnnnnnnnnnnnnnnnnnnnnnnnnnnnnnnnnnnnnnnnnnnnnnnnnnnnnnnnnnnnnnnnnnnnnnnnnnnnnnnnnnnnnnnnnnnnnnnnnnnnnnnnnnnnnnnnnnnnnnnnnnnnnnnnnnnnnnnnnnnnnnnnnnnnnnnnnnnnnnnnnnnnnnnnnnnnnnnnnnnnnnnnnnnnnnnnnnnnnnnnnnnnnnnnnnnnnnnnnnnnnnnnnnnnnnnnnnnnnnnnnnnnnnnnnnnnnnnnnnnnnnnnnnnnnnnnnnnnnnnnnnnnnnnnnnnnnnnnnnnnnnnnnnnnnnnnnnnnnnnnnnnnnnnnnnnnnnnnnnnnnnnnnnnnnnnnnnnnnnnnnnnnnnnnnnnnnnnnnnnnnnnnnnnnnnnnnnnnnnnnnnnnnnnnnnnnnnnnnnnnnnnnnnnnnnnnnnnnnnnnnnnnnnnnnnnnnnnnnnnnnnnnnnnnnnnnnnnnnnnnnnnnnnnnnnnnnnnnnnnnnnnnnnnnnnnnnnnnnnnnnnnnnnnnnnnnnnnnnnnnnnnnnnnnnnnnnnnnnnnnnnnnnnnnnnnnnnnnnnnnnnnnnnnnnnnnnnnnnnnnnnnnnnnnnnnnnnnnnnnnnnnnnnnnnnnnnnnnnnnnnnnnnnnnnnnnnnnnnnnnnnnnnnnnnnnnnnnnnnnnnnnnnnnnnnnnnnnnnnnnnnnnnnnnnnnnnnnnnnnnnnnnnnnnnnnnnnnnnnnnnnnnnnnnnnnnnnnnnnnnnnnnnnnnnnnnnnnnnnnnnnnnnnnnnnnnnnnnnnnnnnnnnnnnnnnnnnnnnnnnnnnnnnnnnnnnnnnnnnnnnnnnnnnnnnnnnnnnnnnnnnnnnnnnnnnnnnnnnnnnnnnnnnnnnnnnnnnnnnnnnnnnnnnnnnnnnnnnnnnnnnnnnnnnnnnnnnnnnnnnnnnnnnnnnnnnnnnnnnnnnnnnnnnnnnnnnnnnnnnnnnnnnnnnnnnnnnnnnnnnnnnnnnnnnnnnnnnnnnnnnnnnnnnnnnnnnnnnnnnnnnnnnnnnnnnnnnnnnnnnnnnnnnnnnnnnnnnnnnnnnnnnnnnnnnnnnnnnnnnnnnnnnnnnnnnnnnnnnnnnnnnnnnnnnnnnnnnnnnnnnnnnnnnnnnnnnnnnnnnnnnnnnnnnnnnnnnnnnnnnnnnnnnnnnnnnnnnnnnnnnnnnnnnnnnnnnnnnnnnnnnnnnnnnnnnnnnnnnnnnnnnnnnnnnnnnnnnnnnnnnnnnnnnnnnnnnnnnnnnnnnnnnnnnnnnnnnnnnnnnnnnnnnnnnnnnnnnnnnnnnnnnnnnnnnnnnnnnnnnnnnnnnnnnnnnnnnnnnnnnnnnnnnnnnnnnnnnnnnnnnnnnnnnnnnnnnnnnnnnnnnnnnnnnnnnnnnnnnnnnnnnnnnnnnnnnnnnnnnnnnnnnnnnnnnnnnnnnnnnnnnnnnnnnnnnnnnnnnnnnnnnnnnnnnnnnnnnnnnnnnnnnnnnnnnnnnnnnnnnnnnnnnnnnnnnnnnnnnnnnnnnnnnnnnnnnnnnnnnnnnnnnnnnnnnnnnnnnnnnnnnnnnnnnnnnnnnnnnnnnnnnnnnnnnnnnnnnnnnnnnnnnnnnnnnnnnnnnnnnnnnnnnnnnnnnnnnnnnnnnnnnnnnnnnnnnnnnnnnnnnnnnnnnnnnnnnnnnnnnnnnnnnnnnnnnnnnnnnnnnnnnnnnnnnnnnnnnnnnnnnnnnnnnnnnnnnnnnnnnnnnnnnnnnnnnnnnnnnnnnnnnnnnnnnnnnnnnnnnnnnnnnnnnnnnnnnnnnnnnnnnnnnnnnnnnnnnnnnnnnnnnnnnnnnnnnnnnnnnnnnnnnnnnnnnnnnnnnnnnnnnnnnnnnnnnnnnnnnnnnnnnnnnnnnnnnnnnnnnnnnnnnnnnnnnnnnnnnnnnnnnnnnnnnnnnnnnnnnnnnnnnnnnnnnnnnnnnnnnnnnnnnnnnnnnnnnnnnnnnnnnnnnnnnnnnnnnnnnnnnnnnnnnnnnnnnnnnnnnnnnnnnnnnnnnnnnnnnnnnnnnnnnnnnnnnnnnnnnnnnnnnnnnnnnnnnnnnnnnnnnnnnnnnnnnnnnnnnnnnnnnnnnnnnnnnnnnnnnnnnnnnnnnnnnnnnnnnnnnnnnnnnnnnnnnnnnnnnnnnnnnnnnnnnnnnnnnnnnnnnnnnnnnnnnnnnnnnnnnnnnnnnnnnnnnnnnnnnnnnnnnnnnnnnnnnnnnnnnnnnnnnnnnnnnnnnnnnnnnnnnnnnnnnnnnnnnnnnnnnnnnnnnnnnnnnnnnnnnnnnnnnnnnnnnnnnnnnnnnnnnnnnnnnnnnnnnnnnnnnnnnnnnnnnnnnnnnnnnnnnnnnnnnnnnnnnnnnnnnnnnnnnnnnnnnnnnnnnnnnnnnnnnnnnnnnnnnnnnnnnnnnnnnnnnnnnnnnnnnnnnnnnnnnnnnnnnnnnnnnnnnnnnnnnnnnnnnnnnnnnnnnnnnnnnnnnnnnnnnnnnnnnnnnnnnnnnnnnnnnnnnnnnnnnnnnnnnnnnnnnnnnnnnnnnnnnnnnnnnnnnnnnnnnnnnnnnnnnnnnnnnnnnnnnnnnnnnnnnnnnnnnnnnnnnnnnnnnnnnnnnnnnnnnnnnnnnnnnnnnnnnnnnnnnnnnnnnnnnnnnnnnnnnnnnnnnnnnnnnnnnnnnnnnnnnnnnnnnnnnnnnnnnnnnnnnnnnnnnnnnnnnnnnnnnnnnnnnnnnnnnnnnnnnnnnnnnnnnnnnnnnnnnnnnnnnnnnnnnnnnnnnnnnnnnnnnnnnnnnnnnnnnnnnnnnnnnnnnnnnnnnnnnnnnnnnnnnnnnnnnnnnnnnnnnnnnnnnnnnnnnnnnnnnnnnnnnnnnnnnnnnnnnnnnnnnnnnnnnnnnnnnnnnnnnnnnnnnnnnnnnnnnnnnnnnnnnnnnnnnnnnnnnnnnnnnnnnnnnnnnnnnnnnnnnnnnnnnnnnnnnnnnnnnnnnnnnnnnnnnnnnnnnnnnnnnnnnnnnnnnnnnnnnnnnnnnnnnnnnnnnnnnnnnnnnnnnnnnnnnnnnnnnnnnnnnnnnnnnnnnnnnnnnnnnnnnnnnnnnnnnnnnnnnnnnnnnnnnnnnnnnnnnnnnnnnnnnnnnnnnnnnnnnnnnnnnnnnnnnnnnnnnnnnnnnnnnnnnnnnnnnnnnnnnnnnnnnnnnnnnnnnnnnnnnnnnnnnnnnnnnnnnnnnnnnnnnnnnnnnnnnnnnnnnnnnnnnnnnnnnnnnnnnnnnnnnnnnnnnnnnnnnnnnnnnnnnnnnnnnnnnnnnnnnnnnnnnnnnnnnnnnnnnnnnnnnnnnnnnnnnnnnnnnnnnnnnnnnnnnnnnnnnnnnnnnnnnnnnnnnnnnnnnnnnnnnnnnnnnnnnnnnnnnnnnnnnnnnnnnnnnnnnnnnnnnnnnnnnnnnnnnnnnnnnnnnnnnnnnnnnnnnnnnnnnnnnnnnnnnnnnnnnnnnnnnnnnnnnnnnnnnnnnnnnnnnnnnnnnnnnnnnnnnnnnnnnnnnnnnnnnnnnnnnnnnnnnnnnnnnnnnnnnnnnnnnnnnnnnnnnnnnnnnnnnnnnnnnnnnnnnnnnnnnnnnnnnnnnnnnnnnnnnnnnnnnnnnnnnnnnnnnnnnnnnnnnnnnnnnnnnnnnnnnnnnnnnnnnnnnnnnnnnnnnnnnnnnnnnnnnnnnnnnnnnnnnnnnnnnnnnnnnnnnnnnnnnnnnnnnnnnnnnnnnnnnnnnnnnnnnnnnnnnnnnnnnnnnnnnnnnnnnnnnnnnnnnnnnnnnnnnnnnnnnnnnnnnnnnnnnnnnnnnnnnnnnnnnnnnnnnnnnnnnnnnnnnnnnnnnnnnnnnnnnnnnnnnnnnnnnnnnnnnnnnnnnnnnnnnnnnnnnnnnnnnnnnnnnnnnnnnnnnnnnnnnnnnnnnnnnnnnnnnnnnnnnnnnnnnnnnnnnnnnnnnnnnnnnnnnnnnnnnnnnnnnnnnnnnnnnnnnnnnnnnnnnnnnnnnnnnnnnnnnnnnnnnnnnnnnnnnnnnnnnnnnnnnnnnnnnnnnnnnnnnnnnnnnnnnnnnnnnnnnnnnnnnnnnnnnnnnnnnnnnnnnnnnnnnnnnnnnnnnnnnnnnnnnnnnnnnnnnnnnnnnnnnnnnnnnnnnnnnnnnnnnnnnnnnnnnnnnnnnnnnnnnnnnnnnnnnnnnnnnnnnnnnnnnnnnnnnnnnnnnnnnnnnnnnnnnnnnnnnnnnnnnnnnnnnnnnnnnnnnnnnnnnnnnnnnnnnnnnnnnnnnnnnnnnnnnnnnnnnnnnnnnnnnnnnnnnnnnnnnnnnnnnnnnnnnnnnnnnnnnnnnnnnnnnnnnnnnnnnnnnnnnnnnnnnnnnnnnnnnnnnnnnnnnnnnnnnnnnnnnnnnnnnnnnnnnnnnnnnnnnnnnnnnnnnnnnnnnnnnnnnnnnnnnnnnnnnnnnnnnnnnnnnnnnnnnnnnnnnnnnnnnnnnnnnnnnnnnnnnnnnnnnnnnnnnnnnnnnnnnnnnnnnnnnnnnnnnnnnnnnnnnnnnnnnnnnnnnnnnnnnnnnnnnnnnnnnnnnnnnnnnnnnnnnnnnnnnnnnnnnnnnnnnnnnnnnnnnnnnnnnnnnnnnnnnnnnnnnnnnnnnnnnnnnnnnnnnnnnnnnnnnnnnnnnnnnnnnnnnnnnnnnnnnnnnnnnnnnnnnnnnnnnnnnnnnnnnnnnnnnnnnnnnnnnnnnnnnnnnnnnnnnnnnnnnnnnnnnnnnnnnnnnnnnnnnnnnnnnnnnnnnnnnnnnnnnnnnnnnnnnnnnnnnnnnnnnnnnnnnnnnnnnnnnnnnnnnnnnnnnnnnnnnnnnnnnnnnnnnnnnnnnnnnnnnnnnnnnnnnnnnnnnnnnnnnnnnnnnnnnnnnnnnnnnnnnnnnnnnnnnnnnnnnnnnnnnnnnnnnnnnnnnnnnnnnnnnnnnnnnnnnnnnnnnnnnnnnnnnnnnnnnnnnnnnnnnnnnnnnnnnnnnnnnnnnnnnnnnnnnnnnnnnnnnnnnnnnnnnnnnnnnnnnnnnnnnnnnnnnnnnnnnnnnnnnnnnnnnnnnnnnnnnnnnnnnnnnnnnnnnnnnnnnnnnnnnnnnnnnnnnnnnnnnnnnnnnnnnnnnnnnnnnnnnnnnnnnnnnnnnnnnnnnnnnnnnnnnnnnnnnnnnnnnnnnnnnnnnnnnnnnnnnnnnnnnnnnnnnnnnnnnnnnnnnnnnnnnnnnnnnnnnnnnnnnnnnnnnnnnnnnnnnnnnnnnnnnnnnnnnnnnnnnnnnnnnnnnnnnnnnnnnnnnnnnnnnnnnnnnnnnnnnnnnnnnnnnnnnnnnnnnnnnnnnnnnnnnnnnnnnnnnnnnnnnnnnnnnnnnnnnnnnnnnnnnnnnnnnnnnnnnnnnnnnnnnnnnnnnnnnnnnnnnnnnnnnnnnnnnnnnnnnnnnnnnnnnnnnnnnnnnnnnnnnnnnnnnnnnnnnnnnnnnnnnnnnnnnnnnnnnnnnnnnnnnnnnnnnnnnnnnnnnnnnnnnnnnnnnnnnnnnnnnnnnnnnnnnnnnnnnnnnnnnnnnnnnnnnnnnnnnnnnnnnnnnnnnnnnnnnnnnnnnnnnnnnnnnnnnnnnnnnnnnnnnnnnnnnnnnnnnnnnnnnnnnnnnnnnnnnnnnnnnnnnnnnnnnnnnnnnnnnnnnnnnnnnnnnnnnnnnnnnnnnnnnnnnnnnnnnnnnnnnnnnnnnnnnnnnnnnnnnnnnnnnnnnnnnnnnnnnnnnnnnnnnnnnnnnnnnnnnnnnnnnnnnnnnnnnnnnnnnnnnnnnnnnnnnnnnnnnnnnnnnnnnnnnnnnnnnnnnnnnnnnnnnnnnnnnnnnnnnnnnnnnnnnnnnnnnnnnnnnnnnnnnnnnnnnnnnnnnnnnnnnnnnnnnnnnnnnnnnnnnnnnnnnnnnnnnnnnnnnnnnnnnnnnnnnnnnnnnnnnnnnnnnnnnnnnnnnnnnnnnnnnnnnnnnnnnnnnnnnnnnnnnnnnnnnnnnnnnnnnnnnnnnnnnnnnnnnnnnnnnnnnnnnnnnnnnnnnnnnnnnnnnnnnnnnnnnnnnnnnnnnnnnnnnnnnnnnnnnnnnnnnnnnnnnnnnnnnnnnnnnnnnnnnnnnnnnnnnnnnnnnnnnnnnnnnnnnnnnnnnnnnnnnnnnnnnnnnnnnnnnnnnnnnnnnnnnnnnnnnnnnnnnnnnnnnnnnnnnnnnnnnnnnnnnnnnnnnnnnnnnnnnnnnnnnnnnnnnnnnnnnnnnnnnnnnnnnnnnnnnnnnnnnnnnnnnnnnnnnnnnnnnnnnnnnnnnnnnnnnnnnnnnnnnnnnnnnnnnnnnnnnnnnnnnnnnnnnnnnnnnnnnnnnnnnnnnnnnnnnnnnnnnnnnnnnnnnnnnnnnnnnnnnnnnnnnnnnnnnnnnnnnnnnnnnnnnnnnnnnnnnnnnnnnnnnnnnnnnnnnnnnnnnnnnnnnnnnnnnnnnnnnnnnnnnnnnnnnnnnnnnnnnnnnnnnnnnnnnnnnnnnnnnnnnnnnnnnnnnnnnnnnnnnnnnnnnnnnnnnnnnnnnnnnnnnnnnnnnnnnnnnnnnnnnnnnnnnnnnnnnnnnnnnnnnnnnnnnnnnnnnnnnnnnnnnnnnnnnnnnnnnnnnnnnnnnnnnnnnnnnnnnnnnnnnnnnnnnnnnnnnnnnnnnnnnnnnnnnnnnnnnnnnnnnnnnnnnnnnnnnnnnnnnnnnnnnnnnnnnnnnnnnnnnnnnnnnnnnnnnnnnnnnnnnnnnnnnnnnnnnnnnnnnnnnnnnnnnnnnnnnnnnnnnnnnnnnnnnnnnnnnnnnnnnnnnnnnnnnnnnnnnnnnnnnnnnnnnnnnnnnnnnnnnnnnnnnnnnnnnnnnnnnnnnnnnnnnnnnnnnnnnnnnnnnnnnnnnnnnnnnnnnnnnnnnnnnnnnnnnnnnnnnnnnnnnnnnnnnnnnnnnnnnnnnnnnnnnnnnnnnnnnnnnnnnnnnnnnnnnnnnnnnnnnnnnnnnnnnnnnnnnnnnnnnnnnnnnnnnnnnnnnnnnnnnnnnnnnnnnnnnnnnnnnnnnnnnnnnnnnnnnnnnnnnnnnnnnnnnnnnnnnnnnnnnnnnnnnnnnnnnnnnnnnnnnnnnnnnnnnnnnnnnnnnnnnnnnnnnnnnnnnnnnnnnnnnnnnnnnnnnnnnnnnnnnnnnnnnnnnnnnnnnnnnnnnnnnnnnnnnnnnnnnnnnnnnnnnnnnnnnnnnnnnnnnnnnnnnnnnnnnnnnnnnnnnnnnnnnnnnnnnnnnnnnnnnnnnnnnnnnnnnnnnnnnnnnnnnnnnnnnnnnnnnnnnnnnnnnnnnnnnnnnnnnnnnnnnnnnnnnnnnnnnnnnnnnnnnnnnnnnnnnnnnnnnnnnnnnnnnnnnnnnnnnnnnnnnnnnnnnnnnnnnnnnnnnnnnnnnnnnnnnnnnnnnnnnnnnnnnnnnnnnnnnnnnnnnnnnnnnnnnnnnnnnnnnnnnnnnnnnnnnnnnnnnnnnnnnnnnnnnnnnnnnnnnnnnnnnnnnnnnnnnnnnnnnnnnnnnnnnnnnnnnnnnnnnnnnnnnnnnnnnnnnnnnnnnnnnnnnnnnnnnnnnnnnnnnnnnnnnnnnnnnnnnnnnnnnnnnnnnnnnnnnnnnnnnnnnnnnnnnnnnnnnnnnnnnnnnnnnnnnnnnnnnnnnnnnnnnnnnnnnnnnnnnnnnnnnnnnnnnnnnnnnnnnnnnnnnnnnnnnnnnnnnnnnnnnnnnnnnnnnnnnnnnnnnnnnnnnnnnnnnnnnnnnnnnnnnnnnnnnnnnnnnnnnnnnnnnnnnnnnnnnnnnnnnnnnnnnnnnnnnnnnnnnnnnnnnnnnnnnnnnnnnnnnnnnnnnnnnnnnnnnnnnnnnnnnnnnnnnnnnnnnnnnnnnnnnnnnnnnnnnnnnnnnnnnnnnnnnnnnnnnnnnnnnnnnnnnnnnnnnnnnnnnnnnnnnnnnnnnnnnnnnnnnnnnnnnnnnnnnnnnnnnnnnnnnnnnnnnnnnnnnnnnnnnnnnnnnnnnnnnnnnnnnnnnnnnnnnnnnnnnnnnnnnnnnnnnnnnnnnnnnnnnnnnnnnnnnnnnnnnnnnnnnnnnnnnnnnnnnnnnnnnnnnnnnnnnnnnnnnnnnnnnnnnnnnnnnnnnnnnnnnnnnnnnnnnnnnnnnnnnnnnnnnnnnnnnnnnnnnnnnnnnnnnnnnnnnnnnnnnnnnnnnnnnnnnnnnnnnnnnnnnnnnnnnnnnnnnnnnnnnnnnnnnnnnnnnnnnnnnnnnnnnnnnnnnnnnnnnnnnnnnnnnnnnnnnnnnnnnnnnnnnnnnnnnnnnnnnnnnnnnnnnnnnnnnnnnnnnnnnnnnnnnnnnnnnnnnnnnnnnnnnnnnnnnnnnnnnnnnnnnnnnnnnnnnnnnnnnnnnnnnnnnnnnnnnnnnnnnnnnnnnnnnnnnnnnnnnnnnnnnnnnnnnnnnnnnnnnnnnnnnnnnnnnnnnnnnnnnnnnnnnnnnnnnnnnnnnnnnnnnnnnnnnnnnnnnnnnnnnnnnnnnnnnnnnnnnnnnnnnnnnnnnnnnnnnnnnnnnnnnnnnnnnnnnnnnnnnnnnnnnnnnnnnnnnnnnnnnnnnnnnnnnnnnnnnnnnnnnnnnnnnnnnnnnnnnnnnnnnnnnnnnnnnnnnnnnnnnnnnnnnnnnnnnnnnnnnnnnnnnnnnnnnnnnnnnnnnnnnnnnnnnnnnnnnnnnnnnnnnnnnnnnnnnnnnnnnnnnnnnnnnnnnnnnnnnnnnnnnnnnnnnnnnnnnnnnnnnnnnnnnnnnnnnnnnnnnnnnnnnnnnnnnnnnnnnnnnnnnnnnnnnnnnnnnnnnnnnnnnnnnnnnnnnnnnnnnnnnnnnnnnnnnnnnnnnnnnnnnnnnnnnnnnnnnnnnnnnnnnnnnnnnnnnnnnnnnnnnnnnnnnnnnnnnnnnnnnnnnnnnnnnnnnnnnnnnnnnnnnnnnnnnnnnnnnnnnnnnnnnnnnnnnnnnnnnnnnnnnnnnnnnnnnnnnnnnnnnnnnnnnnnnnnnnnnnnnnnnnnnnnnnnnnnnnnnnnnnnnnnnnnnnnnnnnnnnnnnnnnnnnnnnnnnnnnnnnnnnnnnnnnnnnnnnnnnnnnnnnnnnnnnnnnnnnnnnnnnnnnnnnnnnnnnnnnnnnnnnnnnnnnnnnnnnnnnnnnnnnnnnnnnnnnnnnnnnnnnnnnnnnnnnnnnnnnnnnnnnnnnnnnnnnnnnnnnnnnnnnnnnnnnnnnnnnnnnnnnnnnnnnnnnnnnnnnnnnnnnnnnnnnnnnnnnnnnnnnnnnnnnnnnnnnnnnnnnnnnnnnnnnnnnnnnnnnnnnnnnnnnnnnnnnnnnnnnnnnnnnnnnnnnnnnnnnnnnnnnnnnnnnnnnnnnnnnnnnnnnnnnnnnnnnnnnnnnnnnnnnnnnnnnnnnnnnnnnnnnnnnnnnnnnnnnnnnnnnnnnnnnnnnnnnnnnnnnnnnnnnnnnnnnnnnnnnnnnnnnnnnnnnnnnnnnnnnnnnnnnnnnnnnnnnnnnnnnnnnnnnnnnnnnnnnnnnnnnnnnnnnnnnnnnnnnnnnnnnnnnnnnnnnnnnnnnnnnnnnnnnnnnnnnnnnnnnnnnnnnnnnnnnnnnnnnnnnnnnnnnnnnnnnnnnnnnnnnnnnnnnnnnnnnnnnnnnnnnnnnnnnnnnnnnnnnnnnnnnnnnnnnnnnnnnnnnnnnnnnnnnnnnnnnnnnnnnnnnnnnnnnnnnnnnnnnnnnnnnnnnnnnnnnnnnnnnnnnnnnnnnnnnnnnnnnnnnnnnnnnnnnnnnnnnnnnnnnnnnnnnnnnnnnnnnnnnnnnnnnnnnnnnnnnnnnnnnnnnnnnnnnnnnnnnnnnnnnnnnnnnnnnnnnnnnnnnnnnnnnnnnnnnnnnnnnnnnnnnnnnnnnnnnnnnnnnnnnnnnnnnnnnnnnnnnnnnnnnnnnnnnnnnnnnnnnnnnnnnnnnnnnnnnnnnnnnnnnnnnnnnnnnnnnnnnnnnnnnnnnnnnnnnnnnnnnnnnnnnnnnnnnnnnnnnnnnnnnnnnnnnnnnnnnnnnnnnnnnnnnnnnnnnnnnnnnnnnnnnnnnnnnnnnnnnnnnnnnnnnnnnnnnnnnnnnnnnnnnnnnnnnnnnnnnnnnnnnnnnnnnnnnnnnnnnnnnnnnnnnnnnnnnnnnnnnnnnnnnnnnnnnnnnnnnnnnnnnnnnnnnnnnnnnnnnnnnnnnnnnnnnnnnnnnnnnnnnnnnnnnnnnnnnnnnnnnnnnnnnnnnnnnnnnnnnnnnnnnnnnnnnnnnnnnnnnnnnnnnnnnnnnnnnnnnnnnnnnnnnnnnnnnnnnnnnnnnnnnnnnnnnnnnnnnnnnnnnnnnnnnnnnnnnnnnnnnnnnnnnnnnnnnnnnnnnnnnnnnnnnnnnnnnnnnnnnnnnnnnnnnnnnnnnnnnnnnnnnnnnnnnnnnnnnnnnnnnnnnnnnnnnnnnnnnnnnnnnnnnnnnnnnnnnnnnnnnnnnnnnnnnnnnnnnnnnnnnnnnnnnnnnnnnnnnnnnnnnnnnnnnnnnnnnnnnnnnnnnnnnnnnnnnnnnnnnnnnnnnnnnnnnnnnnnnnnnnnnnnnnnnnnnnnnnnnnnnnnnnnnnnnnnnnnnnnnnnnnnnnnnnnnnnnnnnnnnnnnnnnnnnnnnnnnnnnnnnnnnnnnnnnnnnnnnnnnnnnnnnnnnnnnnnnnnnnnnnnnnnnnnnnnnnnnnnnnnnnnnnnnnnnnnnnnnnnnnnnnnnnnnnnnnnnnnnnnnnnnnnnnnnnnnnnnnnnnnnnnnnnnnnnnnnnnnnnnnnnnnnnnnnnnnnnnnnnnnnnnnnnnnnnnnnnnnnnnnnnnnnnnnnnnnnnnnnnnnnnnnnnnnnnnnnnnnnnnnnnnnnnnnnnnnnnnnnnnnnnnnnnnnnnnnnnnnnnnnnnnnnnnnnnnnnnnnnnnnnnnnnnnnnnnnnnnnnnnnnnnnnnnnnnnnnnnnnnnnnnnnnnnnnnnnnnnnnnnnnnnnnnnnnnnnnnnnnnnnnnnnnnnnnnnnnnnnnnnnnnnnnnnnnnnnnnnnnnnnnnnnnnnnnnnnnnnnnnnnnnnnnnnnnnnnnnnnnnnnnnnnnnnnnnnnnnnnnnnnnnnnnnnnnnnnnnnnnnnnnnnnnnnnnnnnnnnnnnnnnnnnnnnnnnnnnnnnnnnnnnnnnnnnnnnnnnnnnnnnnnnnnnnnnnnnnnnnnnnnnnnnnnnnnnnnnnnnnnnnnnnnnnnnnnnnnnnnnnnnnnnnnnnnnnnnnnnnnnnnnnnnnnnnnnnnnnnnnnnnnnnnnnnnnnnnnnnnnnnnnnnnnnnnnnnnnnnnnnnnnnnnnnnnnnnnnnnnnnnnnnnnnnnnnnnnnnnnnnnnnnnnnnnnnnnnnnnnnnnnnnnnnnnnnnnnnnnnnnnnnnnnnnnnnnnnnnnnnnnnnnnnnnnnnnnnnnnnnnnnnnnnnnnnnnnnnnnnnnnnnnnnnnnnnnnnnnnnnnnnnnnnnnnnnnnnnnnnnnnnnnnnnnnnnnnnnnnnnnnnnnnnnnnnnnnnnnnnnnnnnnnnnnnnnnnnnnnnnnnnnnnnnnnnnnnnnnnnnnnnnnnnnnnnnnnnnnnnnnnnnnnnnnnnnnnnnnnnnnnnnnnnnnnnnnnnnnnnnnnnnnnnnnnnnnnnnnnnnnnnnnnnnnnnnnnnnnnnnnnnnnnnnnnnnnnnnnnnnnnnnnnnnnnnnnnnnnnnnnnnnnnnnnnnnnnnnnnnnnnnnnnnnnnnnnnnnnnnnnnnnnnnnnnnnnnnnnnnnnnnnnnnnnnnnnnnnnnnnnnnnnnnnnnnnnnnnnnnnnnnnnnnnnnnnnnnnnnnnnnnnnnnnnnnnnnnnnnnnnnnnnnnnnnnnnnnnnnnnnnnnnnnnnnnnnnnnnnnnnnnnnnnnnnnnnnnnnnnnnnnnnnnnnnnnnnnnnnnnnnnnnnnnnnnnnnnnnnnnnnnnnnnnnnnnnnnnnnnnnnnnnnnnnnnnnnnnnnnnnnnnnnnnnnnnnnnnnnnnnnnnnnnnnnnnnnnnnnnnnnnnnnnnnnnnnnnnnnnnnnnnnnnnnnnnnnnnnnnnnnnnnnnnnnnnnnnnnnnnnnnnnnnnnnnnnnnnnnnnnnnnnnnnnnnnnnnnnnnnnnnnnnnnnnnnnnnnnnnnnnnnnnnnnnnnnnnnnnnnnnnnnnnnnnnnnnnnnnnnnnnnnnnnnnnnnnnnnnnnnnnnnnnnnnnnnnnnnnnnnnnnnnnnnnnnnnnnnnnnnnnnnnnnnnnnnnnnnnnnnnnnnnnnnnnnnnnnnnnnnnnnnnnnnnnnnnnnnnnnnnnnnnnnnnnnnnnnnnnnnnnnnnnnnnnnnnnnnnnnnnnnnnnnnnnnnnnnnnnnnnnnnnnnnnnnnnnnnnnnnnnnnnnnnnnnnnnnnnnnnnnnnnnnnnnnnnnnnnnnnnnnnnnnnnnnnnnnnnnnnnnnnnnnnnnnnnnnnnnnnnnnnnnnnnnnnnnnnnnnnnnnnnnnnnnnnnnnnnnnnnnnnnnnnnnnnnnnnnnnnnnnnnnnnnnnnnnnnnnnnnnnnnnnnnnnnnnnnnnnnnnnnnnnnnnnnnnnnnnnnnnnnnnnnnnnnnnnnnnnnnnnnnnnnnnnnnnnnnnnnnnnnnnnnnnnnnnnnnnnnnnnnnnnnnnnnnnnnnnnnnnnnnnnnnnnnnnnnnnnnnnnnnnnnnnnnnnnnnnnnnnnnnnnnnnnnnnnnnnnnnnnnnnnnnnnnnnnnnnnnnnnnnnnnnnnnnnnnnnnnnnnnnnnnnnnnnnnnnnnnnnnnnnnnnnnnnnnnnnnnnnnnnnnnnnnnnnnnnnnnnnnnnnnnnnnnnnnnnnnnnnnnnnnnnnnnnnnnnnnnnnnnnnnnnnnnnnnnnnnnnnnnnnnnnnnnnnnnnnnnnnnnnnnnnnnnnnnnnnnnnnnnnnnnnnnnnnnnnnnnnnnnnnnnnnnnnnnnnnnnnnnnnnnnnnnnnnnnnnnnnnnnnnnnnnnnnnnnnnnnnnnnnnnnnnnnnnnnnnnnnnnnnnnnnnnnnnnnnnnnnnnnnnnnnnnnnnnnnnnnnnnnnnnnnnnnnnnnnnnnnnnnnnnnnnnnnnnnnnnnnnnnnnnnnnnnnnnnnnnnnnnnnnnnnnnnnnnnnnnnnnnnnnnnnnnnnnnnnnnnnnnnnnnnnnnnnnnnnnnnnnnnnnnnnnnnnnnnnnnnnnnnnnnnnnnnnnnnnnnnnnnnnnnnnnnnnnnnnnnnnnnnnnnnnnnnnnnnnnnnnnnnnnnnnnnnnnnnnnnnnnnnnnnnnnnnnnnnnnnnnnnnnnnnnnnnnnnnnnnnnnnnnnnnnnnnnnnnnnnnnnnnnnnnnnnnnnnnnnnnnnnnnnnnnnnnnnnnnnnnnnnnnnnnnnnnnnnnnnnnnnnnnnnnnnnnnnnnnnnnnnnnnnnnnnnnnnnnnnnnnnnnnnnnnnnnnnnnnnnnnnnnnnnnnnnnnnnnnnnnnnnnnnnnnnnnnnnnnnnnnnnnnnnnnnnnnnnnnnnnnnnnnnnnnnnnnnnnnnnnnnnnnnnnnnnnnnnnnnnnnnnnnnnnnnnnnnnnnnnnnnnnnnnnnnnnnnnnnnnnnnnnnnnnnnnnnnnnnnnnnnnnnnnnnnnnnnnnnnnnnnnnnnnnnnnnnnnnnnnnnnnnnnnnnnnnnnnnnnnnnnnnnnnnnnnnnnnnnnnnnnnnnnnnnnnnnnnnnnnnnnnnnnnnnnnnnnnnnnnnnnnnnnnnnnnnnnnnnnnnnnnnnnnnnnnnnnnnnnnnnnnnnnnnnnnnnnnnnnnnnnnnnnnnnnnnnnnnnnnnnnnnnnnnnnnnnnnnnnnnnnnnnnnnnnnnnnnnnnnnnnnnnnnnnnnnnnnnnnnnnnnnnnnnnnnnnnnnnnnnnnnnnnnnnnnnnnnnnnnnnnnnnnnnnnnnnnnnnnnnnnnnnnnnnnnnnnnnnnnnnnnnnnnnnnnnnnnnnnnnnnnnnnnnnnnnnnnnnnnnnnnnnnnnnnnnnnnnnnnnnnnnnnnnnnnnnnnnnnnnnnnnnnnnnnnnnnnnnnnnnnnnnnnnnnnnnnnnnnnnnnnnnnnnnnnnnnnnnnnnnnnnnnnnnnnnnnnnnnnnnnnnnnnnnnnnnnnnnnnnnnnnnnnnnnnnnnnnnnnnnnnnnnnnnnnnnnnnnnnnnnnnnnnnnnnnnnnnnnnnnnnnnnnnnnnnnnnnnnnnnnnnnnnnnnnnnnnnnnnnnnnnnnnnnnnnnnnnnnnnnnnnnnnnnnnnnnnnnnnnnnnnnnnnnnnnnnnnnnnnnnnnnnnnnnnnnnnnnnnnnnnnnnnnnnnnnnnnnnnnnnnnnnnnnnnnnnnnnnnnnnnnnnnnnnnnnnnnnnnnnnnnnnnnnnnnnnnnnnnnnnnnnnnnnnnnnnnnnnnnnnnnnnnnnnnnnnnnnnnnnnnnnnnnnnnnnnnnnnnnnnnnnnnnnnnnnnnnnnnnnnnnnnnnnnnnnnnnnnnnnnnnnnnnnnnnnnnnnnnnnnnnnnnnnnnnnnnnnnnnnnnnnnnnnnnnnnnnnnnnnnnnnnnnnnnnnnnnnnnnnnnnnnnnnnnnnnnnnnnnnnnnnnnnnnnnnnnnnnnnnnnnnnnnnnnnnnnnnnnnnnnnnnnnnnnnnnnnnnnnnnnnnnnnnnnnnnnnnnnnnnnnnnnnnnnnnnnnnnnnnnnnnnnnnnnnnnnnnnnnnnnnnnnnnnnnnnnnnnnnnnnnnnnnnnnnnnnnnnnnnnnnnnnnnnnnnnnnnnnnnnnnnnnnnnnnnnnnnnnnnnnnnnnnnnnnnnnnnnnnnnnnnnnnnnnnnnnnnnnnnnnnnnnnnnnnnnnnnnnnnnnnnnnnnnnnnnnnnnnnnnnnnnnnnnnnnnnnnnnnnnnnnnnnnnnnnnnnnnnnnnnnnnnnnnnnnnnnnnnnnnnnnnnnnnnnnnnnnnnnnnnnnnnnnnnnnnnnnnnnnnnnnnnnnnnnnnnnnnnnnnnnnnnnnnnnnnnnnnnnnnnnnnnnnnnnnnnnnnnnnnnnnnnnnnnnnnnnnnnnnnnnnnnnnnnnnnnnnnnnnnnnnnnnnnnnnnnnnnnnnnnnnnnnnnnnnnnnnnnnnnnnnnnnnnnnnnnnnnnnnnnnnnnnnnnnnnnnnnnnnnnnnnnnnnnnnnnnnnnnnnnnnnnnnnnnnnnnnnnnnnnnnnnnnnnnnnnnnnnnnnnnnnnnnnnnnnnnnnnnnnnnnnnnnnnnnnnnnnnnnnnnnnnnnnnnnnnnnnnnnnnnnnnnnnnnnnnnnnnnnnnnnnnnnnnnnnnnnnnnnnnnnnnnnnnnnnnnnnnnnnnnnnnnnnnnnnnnnnnnnnnnnnnnnnnnnnnnnnnnnnnnnnnnnnnnnnnnnnnnnnnnnnnnnnnnnnnnnnnnnnnnnnnnnnnnnnnnnnnnnnnnnnnnnnnnnnnnnnnnnnnnnnnnnnnnnnnnnnnnnnnnnnnnnnnnnnnnnnnnnnnnnnnnnnnnnnnnnnnnnnnnnnnnnnnnnnnnnnnnnnnnnnnnnnnnnnnnnnnnnnnnnnnnnnnnnnnnnnnnnnnnnnnnnnnnnnnnnnnnnnnnnnnnnnnnnnnnnnnnnnnnnnnnnnnnnnnnnnnnnnnnnnnnnnnnnnnnnnnnnnnnnnnnnnnnnnnnnnnnnnnnnnnnnnnnnnnnnnnnnnnnnnnnnnnnnnnnnnnnnnnnnnnnnnnnnnnnnnnnnnnnnnnnnnnnnnnnnnnnnnnnnnnnnnnnnnnnnnnnnnnnnnnnnnnnnnnnnnnnnnnnnnnnnnnnnnnnnnnnnnnnnnnnnnnnnnnnnnnnnnnnnnnnnnnnnnnnnnnnnnnnnnnnnnnnnnnnnnnnnnnnnnnnnnnnnnnnnnnnnnnnnnnnnnnnnnnnnnnnnnnnnnnnnnnnnnnnnnnnnnnnnnnnnnnnnnnnnnnnnnnnnnnnnnnnnnnnnnnnnnnnnnnnnnnnnnnnnnnnnnnnnnnnnnnnnnnnnnnnnnnnnnnnnnnnnnnnnnnnnnnnnnnnnnnnnnnnnnnnnnnnnnnnnnnnnnnnnnnnnnnnnnnnnnnnnnnnnnnnnnnnnnnnnnnnnnnnnnnnnnnnnnnnnnnnnnnnnnnnnnnnnnnnnnnnnnnnnnnnnnnnnnnnnnnnnnnnnnnnnnnnnnnnnnnnnnnnnnnnnnnnnnnnnnnnnnnnnnnnnnnnnnnnnnnnnnnnnnnnnnnnnnnnnnnnnnnnnnnnnnnnnnnnnnnnnnnnnnnnnnnnnnnnnnnnnnnnnnnnnnnnnnnnnnnnnnnnnnnnnnnnnnnnnnnnnnnnnnnnnnnnnnnnnnnnnnnnnnnnnnnnnnnnnnnnnnnnnnnnnnnnnnnnnnnnnnnnnnnnnnnnnnnnnnnnnnnnnnnnnnnnnnnnnnnnnnnnnnnnnnnnnnnnnnnnnnnnnnnnnnnnnnnnnnnnnnnnnnnnnnnnnnnnnnnnnnnnnnnnnnnnnnnnnnnnnnnnnnnnnnnnnnnnnnnnnnnnnnnnnnnnnnnnnnnnnnnnnnnnnnnnnnnnnnnnnnnnnnnnnnnnnnnnnnnnnnnnnnnnnnnnnnnnnnnnnnnnnnnnnnnnnnnnnnnnnnnnnnnnnnnnnnnnnnnnnnnnnnnnnnnnnnnnnnnnnnnnnnnnnnnnnnnnnnnnnnnnnnnnnnnnnnnnnnnnnnnnnnnnnnnnnnnnnnnnnnnnnnnnnnnnnnnnnnnnnnnnnnnnnnnnnnnnnnnnnnnnnnnnnnnnnnnnnnnnnnnnnnnnnnnnnnnnnnnnnnnnnnnnnnnnnnnnnnnnnnnnnnnnnnnnnnnnnnnnnnnnnnnnnnnnnnnnnnnnnnnnnnnnnnnnnnnnnnnnnnnnnnnnnnnnnnnnnnnnnnnnnnnnnnnnnnnnnnnnnnnnnnnnnnnnnnnnnnnnnnnnnnnnnnnnnnnnnnnnnnnnnnnnnnnnnnnnnnnnnnnnnnnnnnnnnnnnnnnnnnnnnnnnnnnnnnnnnnnnnnnnnnnnnnnnnnnnnnnnnnnnnnnnnnnnnnnnnnnnnnnnnnnnnnnnnnnnnnnnnnnnnnnnnnnnnnnnnnnnnnnnnnnnnnnnnnnnnnnnnnnnnnnnnnnnnnnnnnnnnnnnnnnnnnnnnnnnnnnnnnnnnnnnnnnnnnnnnnnnnnnnnnnnnnnnnnnnnnnnnnnnnnnnnnnnnnnnnnnnnnnnnnnnnnnnnnnnnnnnnnnnnnnnnnnnnnnnnnnnnnnnnnnnnnnnnnnnnnnnnnnnnnnnnnnnnnnnnnnnnnnnnnnnnnnnnnnnnnnnnnnnnnnnnnnnnnnnnnnnnnnnnnnnnnnnnnnnnnnnnnnnnnnnnnnnnnnnnnnnnnnnnnnnnnnnnnnnnnnnnnnnnnnnnnnnnnnnnnnnnnnnnnnnnnnnnnnnnnnnnnnnnnnnnnnnnnnnnnnnnnnnnnnnnnnnnnnnnnnnnnnnnnnnnnnnnnnnnnnnnnnnnnnnnnnnnnnnnnnnnnnnnnnnnnnnnnnnnnnnnnnnnnnnnnnnnnnnnnnnnnnnnnnnnnnnnnnnnnnnnnnnnnnnnnnnnnnnnnnnnnnnnnnnnnnnnnnnnnnnnnnnnnnnnnnnnnnnnnnnnnnnnnnnnnnnnnnnnnnnnnnnnnnnnnnnnnnnnnnnnnnnnnnnnnnnnnnnnnnnnnnnnnnnnnnnnnnnnnnnnnnnnnnnnnnnnnnnnnnnnnnnnnnnnnnnnnnnnnnnnnnnnnnnnnnnnnnnnnnnnnnnnnnnnnnnnnnnnnnnnnnnnnnnnnnnnnnnnnnnnnnnnnnnnnnnnnnnnnnnnnnnnnnnnnnnnnnnnnnnnnnnnnnnnnnnnnnnnnnnnnnnnnnnnnnnnnnnnnnnnnnnnnnnnnnnnnnnnnnnnnnnnnnnnnnnnnnnnnnnnnnnnnnnnnnnnnnnnnnnnnnnnnnnnnnnnnnnnnnnnnnnnnnnnnnnnnnnnnnnnnnnnnnnnnnnnnnnnnnnnnnnnnnnnnnnnnnnnnnnnnnnnnnnnnnnnnnnnnnnnnnnnnnnnnnnnnnnnnnnnnnnnnnnnnnnnnnnnnnnnnnnnnnnnnnnnnnnnnnnnnnnnnnnnnnnnnnnnnnnnnnnnnnnnnnnnnnnnnnnnnnnnnnnnnnnnnnnnnnnnnnnnnnnnnnnnnnnnnnnnnnnnnnnnnnnnnnnnnnnnnnnnnnnnnnnnnnnnnnnnnnnnnnnnnnnnnnnnnnnnnnnnnnnnnnnnnnnnnnnnnnnnnnnnnnnnnnnnnnnnnnnnnnnnnnnnnnnnnnnnnnnnnnnnnnnnnnnnnnnnnnnnnnnnnnnnnnnnnnnnnnnnnnnnnnnnnnnnnnnnnnnnnnnnnnnnnnnnnnnnnnnnnnnnnnnnnnnnnnnnnnnnnnnnnnnnnnnnnnnnnnnnnnnnnnnnnnnnnnnnnnnnnnnnnnnnnnnnnnnnnnnnnnnnnnnnnnnnnnnnnnnnnnnnnnnnnnnnnnnnnnnnnnnnnnnnnnnnnnnnnnnnnnnnnnnnnnnnnnnnnnnnnnnnnnnnnnnnnnnnnnnnnnnnnnnnnnnnnnnnnnnnnnnnnnnnnnnnnnnnnnnnnnnnnnnnnnnnnnnnnnnnnnnnnnnnnnnnnnnnnnnnnnnnnnnnnnnnnnnnnnnnnnnnnnnnnnnnnnnnnnnnnnnnnnnnnnnnnnnnnnnnnnnnnnnnnnnnnnnnnnnnnnnnnnnnnnnnnnnnnnnnnnnnnnnnnnnnnnnnnnnnnnnnnnnnnnnnnnnnnnnnnnnnnnnnnnnnnnnnnnnnnnnnnnnnnnnnnnnnnnnnnnnnnnnnnnnnnnnnnnnnnnnnnnnnnnnnnnnnnnnnnnnnnnnnnnnnnnnnnnnnnnnnnnnnnnnnnnnnnnnnnnnnnnnnnnnnnnnnnnnnnnnnnnnnnnnnnnnnnnnnnnnnnnnnnnnnnnnnnnnnnnnnnnnnnnnnnnnnnnnnnnnnnnnnnnnnnnnnnnnnnnnnnnnnnnnnnnnnnnnnnnnnnnnnnnnnnnnnnnnnnnnnnnnnnnnnnnnnnnnnnnnnnnnnnnnnnnnnnnnnnnnnnnnnnnnnnnnnnnnnnnnnnnnnnnnnnnnnnnnnnnnnnnnnnnnnnnnnnnnnnnnnnnnnnnnnnnnnnnnnnnnnnnnnnnnnnnnnnnnnnnnnnnnnnnnnnnnnnnnnnnnnnnnnnnnnnnnnnnnnnnnnnnnnnnnnnnnnnnnnnnnnnnnnnnnnnnnnnnnnnnnnnnnnnnnnnnnnnnnnnnnnnnnnnnnnnnnnnnnnnnnnnnnnnnnnnnnnnnnnnnnnnnnnnnnnnnnnnnnnnnnnnnnnnnnnnnnnnnnnnnnnnnnnnnnnnnnnnnnnnnnnnnnnnnnnnnnnnnnnnnnnnnnnnnnnnnnnnnnnnnnnnnnnnnnnnnnnnnnnnnnnnnnnnnnnnnnnnnnnnnnnnnnnnnnnnnnnnnnnnnnnnnnnnnnnnnnnnnnnnnnnnnnnnnnnnnnnnnnnnnnnnnnnnnnnnnnnnnnnnnnnnnnnnnnnnnnnnnnnnnnnnnnnnnnnnnnnnnnnnnnnnnnnnnnnnnnnnnnnnnnnnnnnnnnnnnnnnnnnnnnnnnnnnnnnnnnnnnnnnnnnnnnnnnnnnnnnnnnnnnnnnnnnnnnnnnnnnnnnnnnnnnnnnnnnnnnnnnnnnnnnnnnnnnnnnnnnnnnnnnnnnnnnnnnnnnnnnnnnnnnnnnnnnnnnnnnnnnnnnnnnnnnnnnnnnnnnnnnnnnnnnnnnnnnnnnnnnnnnnnnnnnnnnnnnnnnnnnnnnnnnnnnnnnnnnnnnnnnnnnnnnnnnnnnnnnnnnnnnnnnnnnnnnnnnnnnnnnnnnnnnnnnnnnnnnnnnnnnnnnnnnnnnnnnnnnnnnnnnnnnnnnnnnnnnnnnnnnnnnnnnnnnnnnnnnnnnnnnnnnnnnnnnnnnnnnnnnnnnnnnnnnnnnnnnnnnnnnnnnnnnnnnnnnnnnnnnnnnnnnnnnnnnnnnnnnnnnnnnnnnnnnnnnnnnnnnnnnnnnnnnnnnnnnnnnnnnnnnnnnnnnnnnnnnnnnnnnnnnnnnnnnnnnnnnnnnnnnnnnnnnnnnnnnnnnnnnnnnnnnnnnnnnnnnnnnnnnnnnnnnnnnnnnnnnnnnnnnnnnnnnnnnnnnnnnnnnnnnnnnnnnnnnnnnnnnnnnnnnnnnnnnnnnnnnnnnnnnnnnnnnnnnnnnnnnnnnnnnnnnnnnnnnnnnnnnnnnnnnnnnnnnnnnnnnnnnnnnnnnnnnnnnnnnnnnnnnnnnnnnnnnnnnnnnnnnnnnnnnnnnnnnnnnnnnnnnnnnnnnnnnnnnnnnnnnnnnnnnnnnnnnnnnnnnnnnnnnnnnnnnnnnnnnnnnnnnnnnnnnnnnnnnnnnnnnnnnnnnnnnnnnnnnnnnnnnnnnnnnnnnnnnnnnnnnnnnnnnnnnnnnnnnnnnnnnnnnnnnnnnnnnnnnnnnnnnnnnnnnnnnnnnnnnnnnnnnnnnnnnnnnnnnnnnnnnnnnnnnnnnnnnnnnnnnnnnnnnnnnnnnnnnnnnnnnnnnnnnnnnnnnnnnnnnnnnnnnnnnnnnnnnnnnnnnnnnnnnnnnnnnnnnnnnnnnnnnnnnnnnnnnnnnnnnnnnnnnnnnnnnnnnnnnnnnnnnnnnnnnnnnnnnnnnnnnnnnnnnnnnnnnnnnnnnnnnnnnnnnnnnnnnnnnnnnnnnnnnnnnnnnnnnnnnnnnnnnnnnnnnnnnnnnnnnnnnnnnnnnnnnnnnnnnnnnnnnnnnnnnnnnnnnnnnnnnnnnnnnnnnnnnnnnnnnnnnnnnnnnnnnnnnnnnnnnnnnnnnnnnnnnnnnnnnnnnnnnnnnnnnnnnnnnnnnnnnnnnnnnnnnnnnnnnnnnnnnnnnnnnnnnnnnnnnnnnnnnnnnnnnnnnnnnnnnnnnnnnnnnnnnnnnnnnnnnnnnnnnnnnnnnnnnnnnnnnnnnnnnnnnnnnnnnnnnnnnnnnnnnnnnnnnnnnnnnnnnnnnnnnnnnnnnnnnnnnnnnnnnnnnnnnnnnnnnnnnnnnnnnnnnnnnnnnnnnnnnnnnnnnnnnnnnnnnnnnnnnnnnnnnnnnnnnnnnnnnnnnnnnnnnnnnnnnnnnnnnnnnnnnnnnnnnnnnnnnnnnnnnnnnnnnnnnnnnnnnnnnnnnnnnnnnnnnnnnnnnnnnnnnnnnnnnnnnnnnnnnnnnnnnnnnnnnnnnnnnnnnnnnnnnnnnnnnnnnnnnnnnnnnnnnnnnnnnnnnnnnnnnnnnnnnnnnnnnnnnnnnnnnnnnnnnnnnnnnnnnnnnnnnnnnnnnnnnnnnnnnnnnnnnnnnnnnnnnnnnnnnnnnnnnnnnnnnnnnnnnnnnnnnnnnnnnnnnnnnnnnnnnnnnnnnnnnnnnnnnnnnnnnnnnnnnnnnnnnnnnnnnnnnnnnnnnnnnnnnnnnnnnnnnnnnnnnnnnnnnnnnnnnnnnnnnnnnnnnnnnnnnnnnnnnnnnnnnnnnnnnnnnnnnnnnnnnnnnnnnnnnnnnnnnnnnnnnnnnnnnnnnnnnnnnnnnnnnnnnnnnnnnnnnnnnnnnnnnnnnnnnnnnnnnnnnnnnnnnnnnnnnnnnnnnnnnnnnnnnnnnnnnnnnnnnnnnnnnnnnnnnnnnnnnnnnnnnnnnnnnnnnnnnnnnnnnnnnnnnnnnnnnnnnnnnnnnnnnnnnnnnnnnnnnnnnnnnnnnnnnnnnnnnnnnnnnnnnnnnnnnnnnnnnnnnnnnnnnnnnnnnnnnnnnnnnnnnnnnnnnnnnnnnnnnnnnnnnnnnnnnnnnnnnnnnnnnnnnnnnnnnnnnnnnnnnnnnnnnnnnnnnnnnnnnnnnnnnnnnnnnnnnnnnnnnnnnnnnnnnnnnnnnnnnnnnnnnnnnnnnnnnnnnnnnnnnnnnnnnnnnnnnnnnnnnnnnnnnnnnnnnnnnnnnnnnnnnnnnnnnnnnnnnnnnnnnnnnnnnnnnnnnnnnnnnnnnnnnnnnnnnnnnnnnnnnnnnnnnnnnnnnnnnnnnnnnnnnnnnnnnnnnnnnnnnnnnnnnnnnnnnnnnnnnnnnnnnnnnnnnnnnnnnnnnnnnnnnnnnnnnnnnnnnnnnnnnnnnnnnnnnnnnnnnnnnnnnnnnnnnnnnnnnnnnnnnnnnnnnnnnnnnnnnnnnnnnnnnnnnnnnnnnnnnnnnnnnnnnnnnnnnnnnnnnnnnnnnnnnnnnnnnnnnnnnnnnnnnnnnnnnnnnnnnnnnnnnnnnnnnnnnnnnnnnnnnnnnnnnnnnnnnnnnnnnnnnnnnnnnnnnnnnnnnnnnnnnnnnnnnnnnnnnnnnnnnnnnnnnnnnnnnnnnnnnnnnnnnnnnnnnnnnnnnnnnnnnnnnnnnnnnnnnnnnnnnnnnnnnnnnnnnnnnnnnnnnnnnnnnnnnnnnnnnnnnnnnnnnnnnnnnnnnnnnnnnnnnnnnnnnnnnnnnnnnnnnnnnnnnnnnnnnnnnnnnnnnnnnnnnnnnnnnnnnnnnnnnnnnnnnnnnnnnnnnnnnnnnnnnnnnnnnnnnnnnnnnnnnnnnnnnnnnnnnnnnnnnnnnnnnnnnnnnnnnnnnnnnnnnnnnnnnnnnnnnnnnnnnnnnnnnnnnnnnnnnnnnnnnnnnnnnnnnnnnnnnnnnnnnnnnnnnnnnnnnnnnnnnnnnnnnnnnnnnnnnnnnnnnnnnnnnnnnnnnnnnnnnnnnnnnnnnnnnnnnnnnnnnnnnnnnnnnnnnnnnnnnnnnnnnnnnnnnnnnnnnnnnnnnnnnnnnnnnnnnnnnnnnnnnnnnnnnnnnnnnnnnnnnnnnnnnnnnnnnnnnnnnnnnnnnnnnnnnnnnnnnnnnnnnnnnnnnnnnnnnnnnnnnnnnnnnnnnnnnnnnnnnnnnnnnnnnnnnnnnnnnnnnnnnnnnnnnnnnnnnnnnnnnnnnnnnnnnnnnnnnnnnnnnnnnnnnnnnnnnnnnnnnnnnnnnnnnnnnnnnnnnnnnnnnnnnnnnnnnnnnnnnnnnnnnnnnnnnnnnnnnnnnnnnnnnnnnnnnnnnnnnnnnnnnnnnnnnnnnnnnnnnnnnnnnnnnnnnnnnnnnnnnnnnnnnnnnnnnnnnnnnnnnnnnnnnnnnnnnnnnnnnnnnnnnnnnnnnnnnnnnnnnnnnnnnnnnnnnnnnnnnnnnnnnnnnnnnnnnnnnnnnnnnnnnnnnnnnnnnnnnnnnnnnnnnnnnnnnnnnnnnnnnnnnnnnnnnnnnnnnnnnnnnnnnnnnnnnnnnnnnnnnnnnnnnnnnnnnnnnnnnnnnnnnnnnnnnnnnnnnnnnnnnnnnnnnnnnnnnnnnnnnnnnnnnnnnnnnnnnnnnnnnnnnnnnnnnnnnnnnnnnnnnnnnnnnnnnnnnnnnnnnnnnnnnnnnnnnnnnnnnnnnnnnnnnnnnnnnnnnnnnnnnnnnnnnnnnnnnnnnnnnnnnnnnnnnnnnnnnnnnnnnnnnnnnnnnnnnnnnnnnnnnnnnnnnnnnnnnnnnnnnnnnnnnnnnnnnnnnnnnnnnnnnnnnnnnnnnnnnnnnnnnnnnnnnnnnnnnnnnnnnnnnnnnnnnnnnnnnnnnnnnnnnnnnnnnnnnnnnnnnnnnnnnnnnnnnnnnnnnnnnnnnnnnnnnnnnnnnnnnnnnnnnnnnnnnnnnnnnnnnnnnnnnnnnnnnnnnnnnnnnnnnnnnnnnnnnnnnnnnnnnnnnnnnnnnnnnnnnnnnnnnnnnnnnnnnnnnnnnnnnnnnnnnnnnnnnnnnnnnnnnnnnnnnnnnnnnnnnnnnnnnnnnnnnnnnnnnnnnnnnnnnnnnnnnnnnnnnnnnnnnnnnnnnnnnnnnnnnnnnnnnnnnnnnnnnnnnnnnnnnnnnnnnnnnnnnnnnnnnnnnnnnnnnnnnnnnnnnnnnnnnnnnnnnnnnnnnnnnnnnnnnnnnnnnnnnnnnnnnnnnnnnnnnnnnnnnnnnnnnnnnnnnnnnnnnnnnnnnnnnnnnnnnnnnnnnnnnnnnnnnnnnnnnnnnnnnnnnnnnnnnnnnnnnnnnnnnnnnnnnnnnnnnnnnnnnnnnnnnnnnnnnnnnnnnnnnnnnnnnnnnnnnnnnnnnnnnnnnnnnnnnnnnnnnnnnnnnnnnnnnnnnnnnnnnnnnnnnnnnnnnnnnnnnnnnnnnnnnnnnnnnnnnnnnnnnnnnnnnnnnnnnnnnnnnnnnnnnnnnnnnnnnnnnnnnnnnnnnnnnnnnnnnnnnnnnnnnnnnnnnnnnnnnnnnnnnnnnnnnnnnnnnnnnnnnnnnnnnnnnnnnnnnnnnnnnnnnnnnnnnnnnnnnnnnnnnnnnnnnnnnnnnnnnnnnnnnnnnnnnnnnnnnnnnnnnnnnnnnnnnnnnnnnnnnnnnnnnnnnnnnnnnnnnnnnnnnnnnnnnnnnnnnnnnnnnnnnnnnnnnnnnnnnnnnnnnnnnnnnnnnnnnnnnnnnnnnnnnnnnnnnnnnnnnnnnnnnnnnnnnnnnnnnnnnnnnnnnnnnnnnnnnnnnnnnnnnnnnnnnnnnnnnnnnnnnnnnnnnnnnnnnnnnnnnnnnnnnnnnnnnnnnnnnnnnnnnnnnnnnnnnnnnnnnnnnnnnnnnnnnnnnnnnnnnnnnnnnnnnnnnnnnnnnnnnnnnnnnnnnnnnnnnnnnnnnnnnnnnnnnnnnnnnnnnnnnnnnnnnnnnnnnnnnnnnnnnnnnnnnnnnnnnnnnnnnnnnnnnnnnnnnnnnnnnnnnnnnnnnnnnnnnnnnnnnnnnnnnnnnnnnnnnnnnnnnnnnnnnnnnnnnnnnnnnnnnnnnnnnnnnnnnnnnnnnnnnnnnnnnnnnnnnnnnnnnnnnnnnnnnnnnnnnnnnnnnnnnnnnnnnnnnnnnnnnnnnnnnnnnnnnnnnnnnnnnnnnnnnnnnnnnnnnnnnnnnnnnnnnnnnnnnnnnnnnnnnnnnnnnnnnnnnnnnnnnnnnnnnnnnnnnnnnnnnnnnnnnnnnnnnnnnnnnnnnnnnnnnnnnnnnnnnnnnnnnnnnnnnnnnnnnnnnnnnnnnnnnnnnnnnnnnnnnnnnnnnnnnnnnnnnnnnnnnnnnnnnnnnnnnnnnnnnnnnnnnnnnnnnnnnnnnnnnnnnnnnnnnnnnnnnnnnnnnnnnnnnnnnnnnnnnnnnnnnnnnnnnnnnnnnnnnnnnnnnnnnnnnnnnnnnnnnnnnnnnnnnnnnnnnnnnnnnnnnnnnnnnnnnnnnnnnnnnnnnnnnnnnnnnnnnnnnnnnnnnnnnnnnnnnnnnnnnnnnnnnnnnnnnnnnnnnnnnnnnnnnnnnnnnnnnnnnnnnnnnnnnnnnnnnnnnnnnnnnnnnnnnnnnnnnnnnnnnnnnnnnnnnnnnnnnnnnnnnnnnnnnnnnnnnnnnnnnnnnnnnnnnnnnnnnnnnnnnnnnnnnnnnnnnnnnnnnnnnnnnnnnnnnnnnnnnnnnnnnnnnnnnnnnnnnnnnnnnnnnnnnnnnnnnnnnnnnnnnnnnnnnnnnnnnnnnnnnnnnnnnnnnnnnnnnnnnnnnnnnnnnnnnnnnnnnnnnnnnnnnnnnnnnnnnnnnnnnnnnnnnnnnnnnnnnnnnnnnnnnnnnnnnnnnnnnnnnnnnnnnnnnnnnnnnnnnnnnnnnnnnnnnnnnnnnnnnnnnnnnnnnnnnnnnnnnnnnnnnnnnnnnnnnnnnnnnnnnnnnnnnnnnnnnnnnnnnnnnnnnnnnnnnnnnnnnnnnnnnnnnnnnnnnnnnnnnnnnnnnnnnnnnnnnnnnnnnnnnnnnnnnnnnnnnnnnnnnnnnnnnnnnnnnnnnnnnnnnnnnnnnnnnnnnnnnnnnnnnnnnnnnnnnnnnnnnnnnnnnnnnnnnnnnnnnnnnnnnnnnnnnnnnnnnnnnnnnnnnnnnnnnnnnnnnnnnnnnnnnnnnnnnnnnnnnnnnnnnnnnnnnnnnnnnnnnnnnnnnnnnnnnnnnnnnnnnnnnnnnnnnnnnnnnnnnnnnnnnnnnnnnnnnnnnnnnnnnnnnnnnnnnnnnnnnnnnnnnnnnnnnnnnnnnnnnnnnnnnnnnnnnnnnnnnnnnnnnnnnnnnnnnnnnnnnnnnnnnnnnnnnnnnnnnnnnnnnnnnnnnnnnnnnnnnnnnnnnnnnnnnnnnnnnnnnnnnnnnnnnnnnnnnnnnnnnnnnnnnnnnnnnnnnnnnnnnnnnnnnnnnnnnnnnnnnnnnnnnnnnnnnnnnnnnnnnnnnnnnnnnnnnnnnnnnnnnnnnnnnnnnnnnnnnnnnnnnnnnnnnnnnnnnnnnnnnnnnnnnnnnnnnnnnnnnnnnnnnnnnnnnnnnnnnnnnnnnnnnnnnnnnnnnnnnnnnnnnnnnnnnnnnnnnnnnnnnnnnnnnnnnnnnnnnnnnnnnnnnnnnnnnnnnnnnnnnnnnnnnnnnnnnnnnnnnnnnnnnnnnnnnnnnnnnnnnnnnnnnnnnnnnnnnnnnnnnnnnnnnnnnnnnnnnnnnnnnnnnnnnnnnnnnnnnnnnnnnnnnnnnnnnnnnnnnnnnnnnnnnnnnnnnnnnnnnnnnnnnnnnnnnnnnnnnnnnnnnnnnnnnnnnnnnnnnnnnnnnnnnnnnnnnnnnnnnnnnnnnnnnnnnnnnnnnnnnnnnnnnnnnnnnnnnnnnnnnnnnnnnnnnnnnnnnnnnnnnnnnnnnnnnnnnnnnnnnnnnnnnnnnnnnnnnnnnnnnnnnnnnnnnnnnnnnnnnnnnnnnnnnnnnnnnnnnnnnnnnnnnnnnnnnnnnnnnnnnnnnnnnnnnnnnnnnnnnnnnnnnnnnnnnnnnnnnnnnnnnnnnnnnnnnnnnnnnnnnnnnnnnnnnnnnnnnnnnnnnnnnnnnnnnnnnnnnnnnnnnnnnnnnnnnnnnnnnnnnnnnnnnnnnnnnnnnnnnnnnnnnnnnnnnnnnnnnnnnnnnnnnnnnnnnnnnnnnnnnnnnnnnnnnnnnnnnnnnnnnnnnnnnnnnnnnnnnnnnnnnnnnnnnnnnnnnnnnnnnnnnnnnnnnnnnnnnnnnnnnnnnnnnnnnnnnnnnnnnnnnnnnnnnnnnnnnnnnnnnnnnnnnnnnnnnnnnnnnnnnnnnnnnnnnnnnnnnnnnnnnnnnnnnnnnnnnnnnnnnnnnnnnnnnnnnnnnnnnnnnnnnnnnnnnnnnnnnnnnnnnnnnnnnnnnnnnnnnnnnnnnnnnnnnnnnnnnnnnnnnnnnnnnnnnnnnnnnnnnnnnnnnnnnnnnnnnnnnnnnnnnnnnnnnnnnnnnnnnnnnnnnnnnnnnnnnnnnnnnnnnnnnnnnnnnnnnnnnnnnnnnnnnnnnnnnnnnnnnnnnnnnnnnnnnnnnnnnnnnnnnnnnnnnnnnnnnnnnnnnnnnnnnnnnnnnnnnnnnnnnnnnnnnnnnnnnnnnnnnnnnnnnnnnnnnnnnnnnnnnnnnnnnnnnnnnnnnnnnnnnnnnnnnnnnnnnnnnnnnnnnnnnnnnnnnnnnnnnnnnnnnnnnnnnnnnnnnnnnnnnnnnnnnnnnnnnnnnnnnnnnnnnnnnnnnnnnnnnnnnnnnnnnnnnnnnnnnnnnnnnnnnnnnnnnnnnnnnnnnnnnnnnnnnnnnnnnnnnnnnnnnnnnnnnnnnnnnnnnnnnnnnnnnnnnnnnnnnnnnnnnnnnnnnnnnnnnnnnnnnnnnnnnnnnnnnnnnnnnnnnnnnnnnnnnnnnnnnnnnnnnnnnnnnnnnnnnnnnnnnnnnnnnnnnnnnnnnnnnnnnnnnnnnnnnnnnnnnnnnnnnnnnnnnnnnnnnnnnnnnnnnnnnnnnnnnnnnnnnnnnnnnnnnnnnnnnnnnnnnnnnnnnnnnnnnnnnnnnnnnnnnnnnnnnnnnnnnnnnnnnnnnnnnnnnnnnnnnnnnnnnnnnnnnnnnnnnnnnnnnnnnnnnnnnnnnnnnnnnnnnnnnnnnnnnnnnnnnnnnnnnnnnnnnnnnnnnnnnnnnnnnnnnnnnnnnnnnnnnnnnnnnnnnnnnnnnnnnnnnnnnnnnnnnnnnnnnnnnnnnnnnnnnnnnnnnnnnnnnnnnnnnnnnnnnnnnnnnnnnnnnnnnnnnnnnnnnnnnnnnnnnnnnnnnnnnnnnnnnnnnnnnnnnnnnnnnnnnnnnnnnnnnnnnnnnnnnnnnnnnnnnnnnnnnnnnnnnnnnnnnnnnnnnnnnnnnnnnnnnnnnnnnnnnnnnnnnnnnnnnnnnnnnnnnnnnnnnnnnnnnnnnnnnnnnnnnnnnnnnnnnnnnnnnnnnnnnnnnnnnnnnnnnnnnnnnnnnnnnnnnnnnnnnnnnnnnnnnnnnnnnnnnnnnnnnnnnnnnnnnnnnnnnnnnnnnnnnnnnnnnnnnnnnnnnnnnnnnnnnnnnnnnnnnnnnnnnnnnnnnnnnnnnnnnnnnnnnnnnnnnnnnnnnnnnnnnnnnnnnnnnnnnnnnnnnnnnnnnnnnnnnnnnnnnnnnnnnnnnnnnnnnnnnnnnnnnnnnnnnnnnnnnnnnnnnnnnnnnnnnnnnnnnnnnnnnnnnnnnnnnnnnnnnnnnnnnnnnnnnnnnnnnnnnnnnnnnnnnnnnnnnnnnnnnnnnnnnnnnnnnnnnnnnnnnnnnnnnnnnnnnnnnnnnnnnnnnnnnnnnnnnnnnnnnnnnnnnnnnnnnnnnnnnnnnnnnnnnnnnnnnnnnnnnnnnnnnnnnnnnnnnnnnnnnnnnnnnnnnnnnnnnnnnnnnnnnnnnnnnnnnnnnnnnnnnnnnnnnnnnnnnnnnnnnnnnnnnnnnnnnnnnnnnnnnnnnnnnnnnnnnnnnnnnnnnnnnnnnnnnnnnnnnnnnnnnnnnnnnnnnnnnnnnnnnnnnnnnnnnnnnnnnnnnnnnnnnnnnnnnnnnnnnnnnnnnnnnnnnnnnnnnnnnnnnnnnnnnnnnnnnnnnnnnnnnnnnnnnnnnnnnnnnnnnnnnnnnnnnnnnnnnnnnnnnnnnnnnnnnnnnnnnnnnnnnnnnnnnnnnnnnnnnnnnnnnnnnnnnnnnnnnnnnnnnnnnnnnnnnnnnnnnnnnnnnnnnnnnnnnnnnnnnnnnnnnnnnnnnnnnnnnnnnnnnnnnnnnnnnnnnnnnnnnnnnnnnnnnnnnnnnnnnnnnnnnnnnnnnnnnnnnnnnnnnnnnnnnnnnnnnnnnnnnnnnnnnnnnnnnnnnnnnnnnnnnnnnnnnnnnnnnnnnnnnnnnnnnnnnnnnnnnnnnnnnnnnnnnnnnnnnnnnnnnnnnnnnnnnnnnnnnnnnnnnnnnnnnnnnnnnnnnnnnnnnnnnnnnnnnnnnnnnnnnnnnnnnnnnnnnnnnnnnnnnnnnnnnnnnnnnnnnnnnnnnnnnnnnnnnnnnnnnnnnnnnnnnnnnnnnnnnnnnnnnnnnnnnnnnnnnnnnnnnnnnnnnnnnnnnnnnnnnnnnnnnnnnnnnnnnnnnnnnnnnnnnnnnnnnnnnnnnnnnnnnnnnnnnnnnnnnnnnnnnnnnnnnnnnnnnnnnnnnnnnnnnnnnnnnnnnnnnnnnnnnnnnnnnnnnnnnnnnnnnnnnnnnnnnnnnnnnnnnnnnnnnnnnnnnnnnnnnnnnnnnnnnnnnnnnnnnnnnnnnnnnnnnnnnnnnnnnnnnnnnnnnnnnnnnnnnnnnnnnnnnnnnnnnnnnnnnnnnnnnnnnnnnnnnnnnnnnnnnnnnnnnnnnnnnnnnnnnnnnnnnnnnnnnnnnnnnnnnnnnnnnnnnnnnnnnnnnnnnnnnnnnnnnnnnnnnnnnnnnnnnnnnnnnnnnnnnnnnnnnnnnnnnnnnnnnnnnnnnnnnnnnnnnnnnnnnnnnnnnnnnnnnnnnnnnnnnnnnnnnnnnnnnnnnnnnnnnnnnnnnnnnnnnnnnnnnnnnnnnnnnnnnnnnnnnnnnnnnnnnnnnnnnnnnnnnnnnnnnnnnnnnnnnnnnnnnnnnnnnnnnnnnnnnnnnnnnnnnnnnnnnnnnnnnnnnnnnnnnnnnnnnnnnnnnnnnnnnnnnnnnnnnnnnnnnnnnnnnnnnnnnnnnnnnnnnnnnnnnnnnnnnnnnnnnnnnnnnnnnnnnnnnnnnnnnnnnnnnnnnnnnnnnnnnnnnnnnnnnnnnnnnnnnnnnnnnnnnnnnnnnnnnnnnnnnnnnnnnnnnnnnnnnnnnnnnnnnnnnnnnnnnnnnnnnnnnnnnnnnnnnnnnnnnnnnnnnnnnnnnnnnnnnnnnnnnnnnnnnnnnnnnnnnnnnnnnnnnnnnnnnnnnnnnnnnnnnnnnnnnnnnnnnnnnnnnnnnnnnnnnnnnnnnnnnnnnnnnnnnnnnnnnnnnnnnnnnnnnnnnnnnnnnnnnnnnnnnnnnnnnnnnnnnnnnnnnnnnnnnnnnnnnnnnnnnnnnnnnnnnnnnnnnnnnnnnnnnnnnnnnnnnnnnnnnnnnnnnnnnnnnnnnnnnnnnnnnnnnnnnnnnnnnnnnnnnnnnnnnnnnnnnnnnnnnnnnnnnnnnnnnnnnnnnnnnnnnnnnnnnnnnnnnnnnnnnnnnnnnnnnnnnnnnnnnnnnnnnnnnnnnnnnnnnnnnnnnnnnnnnnnnnnnnnnnnnnnnnnnnnnnnnnnnnnnnnnnnnnnnnnnnnnnnnnnnnnnnnnnnnnnnnnnnnnnnnnnnnnnnnnnnnnnnnnnnnnnnnnnnnnnnnnnnnnnnnnnnnnnnnnnnnnnnnnnnnnnnnnnnnnnnnnnnnnnnnnnnnnnnnnnnnnnnnnnnnnnnnnnnnnnnnnnnnnnnnnnnnnnnnnnnnnnnnnnnnnnnnnnnnnnnnnnnnnnnnnnnnnnnnnnnnnnnnnnnnnnnnnnnnnnnnnnnnnnnnnnnnnnnnnnnnnnnnnnnnnnnnnnnnnnnnnnnnnnnnnnnnnnnnnnnnnnnnnnnnnnnnnnnnnnnnnnnnnnnnnnnnnnnnnnnnnnnnnnnnnnnnnnnnnnnnnnnnnnnnnnnnnnnnnnnnnnnnnnnnnnnnnnnnnnnnnnnnnnnnnnnnnnnnnnnnnnnnnnnnnnnnnnnnnnnnnnnnnnnnnnnnnnnnnnnnnnnnnnnnnnnnnnnnnnnnnnnnnnnnnnnnnnnnnnnnnnnnnnnnnnnnnnnnnnnnnnnnnnnnnnnnnnnnnnnnnnnnnnnnnnnnnnnnnnnnnnnnnnnnnnnnnnnnnnnnnnnnnnnnnnnnnnnnnnnnnnnnnnnnnnnnnnnnnnnnnnnnnnnnnnnnnnnnnnnnnnnnnnnnnnnnnnnnnnnnnnnnnnnnnnnnnnnnnnnnnnnnnnnnnnnnnnnnnnnnnnnnnnnnnnnnnnnnnnnnnnnnnnnnnnnnnnnnnnnnnnnnnnnnnnnnnnnnnnnnnnnnnnnnnnnnnnnnnnnnnnnnnnnnnnnnnnnnnnnnnnnnnnnnnnnnnnnnnnnnnnnnnnnnnnnnnnnnnnnnnnnnnnnnnnnnnnnnnnnnnnnnnnnnnnnnnnnnnnnnnnnnnnnnnnnnnnnnnnnnnnnnnnnnnnnnnnnnnnnnnnnnnnnnnnnnnnnnnnnnnnnnnnnnnnnnnnnnnnnnnnnnnnnnnnnnnnnnnnnnnnnnnnnnnnnnnnnnnnnnnnnnnnnnnnnnnnnnnnnnnnnnnnnnnnnnnnnnnnnnnnnnnnnnnnnnnnnnnnnnnnnnnnnnnnnnnnnnnnnnnnnnnnnnnnnnnnnnnnnnnnnnnnnnnnnnnnnnnnnnnnnnnnnnnnnnnnnnnnnnnnnnnnnnnnnnnnnnnnnnnnnnnnnnnnnnnnnnnnnnnnnnnnnnnnnnnnnnnnnnnnnnnnnnnnnnnnnnnnnnnnnnnnnnnnnnnnnnnnnnnnnnnnnnnnnnnnnnnnnnnnnnnnnnnnnnnnnnnnnnnnnnnnnnnnnnnnnnnnnnnnnnnnnnnnnnnnnnnnnnnnnnnnnnnnnnnnnnnnnnnnnnnnnnnnnnnnnnnnnnnnnnnnnnnnnnnnnnnnnnnnnnnnnnnnnnnnnnnnnnnnnnnnnnnnnnnnnnnnnnnnnnnnnnnnnnnnnnnnnnnnnnnnnnnnnnnnnnnnnnnnnnnnnnnnnnnnnnnnnnnnnnnnnnnnnnnnnnnnnnnnnnnnnnnnnnnnnnnnnnnnnnnnnnnnnnnnnnnnnnnnnnnnnnnnnnnnnnnnnnnnnnnnnnnnnnnnnnnnnnnnnnnnnnnnnnnnnnnnnnnnnnnnnnnnnnnnnnnnnnnnnnnnnnnnnnnnnnnnnnnnnnnnnnnnnnnnnnnnnnnnnnnnnnnnnnnnnnnnnnnnnnnnnnnnnnnnnnnnnnnnnnnnnnnnnnnnnnnnnnnnnnnnnnnnnnnnnnnnnnnnnnnnnnnnnnnnnnnnnnnnnnnnnnnnnnnnnnnnnnnnnnnnnnnnnnnnnnnnnnnnnnnnnnnnnnnnnnnnnnnnnnnnnnnnnnnnnnnnnnnnnnnnnnnnnnnnnnnnnnnnnnnnnnnnnnnnnnnnnnnnnnnnnnnnnnnnnnnnnnnnnnnnnnnnnnnnnnnnnnnnnnnnnnnnnnnnnnnnnnnnnnnnnnnnnnnnnnnnnnnnnnnnnnnnnnnnnnnnnnnnnnnnnnnnnnnnnnnnnnnnnnnnnnnnnnnnnnnnnnnnnnnnnnnnnnnnnnnnnnnnnnnnnnnnnnnnnnnnnnnnnnnnnnnnnnnnnnnnnnnnnnnnnnnnnnnnnnnnnnnnnnnnnnnnnnnnnnnnnnnnnnnnnnnnnnnnnnnnnnnnnnnnnnnnnnnnnnnnnnnnnnnnnnnnnnnnnnnnnnnnnnnnnnnnnnnnnnnnnnnnnnnnnnnnnnnnnnnnnnnnnnnnnnnnnnnnnnnnnnnnnnnnnnnnnnnnnnnnnnnnnnnnnnnnnnnnnnnnnnnnnnnnnnnnnnnnnnnnnnnnnnnnnnnnnnnnnnnnnnnnnnnnnnnnnnnnnnnnnnnnnnnnnnnnnnnnnnnnnnnnnnnnnnnnnnnnnnnnnnnnnnnnnnnnnnnnnnnnnnnnnnnnnnnnnnnnnnnnnnnnnnnnnnnnnnnnnnnnnnnnnnnnnnnnnnnnnnnnnnnnnnnnnnnnnnnnnnnnnnnnnnnnnnnnnnnnnnnnnnnnnnnnnnnnnnnnnnnnnnnnnnnnnnnnnnnnnnnnnnnnnnnnnnnnnnnnnnnnnnnnnnnnnnnnnnnnnnnnnnnnnnnnnnnnnnnnnnnnnnnnnnnnnnnnnnnnnnnnnnnnnnnnnnnnnnnnnnnnnnnnnnnnnnnnnnnnnnnnnnnnnnnnnnnnnnnnnnnnnnnnnnnnnnnnnnnnnnnnnnnnnnnnnnnnnnnnnnnnnnnnnnnnnnnnnnnnnnnnnnnnnnnnnnnnnnnnnnnnnnnnnnnnnnnnnnnnnnnnnnnnnnnnnnnnnnnnnnnnnnnnnnnnnnnnnnnnnnnnnnnnnnnnnnnnnnnnnnnnnnnnnnnnnnnnnnnnnnnnnnnnnnnnnnnnnnnnnnnnnnnnnnnnnnnnnnnnnnnnnnnnnnnnnnnnnnnnnnnnnnnnnnnnnnnnnnnnnnnnnnnnnnnnnnnnnnnnnnnnnnnnnnnnnnnnnnnnnnnnnnnnnnnnnnnnnnnnnnnnnnnnnnnnnnnnnnnnnnnnnnnnnnnnnnnnnnnnnnnnnnnnnnnnnnnnnnnnnnnnnnnnnnnnnnnnnnnnnnnnnnnnnnnnnnnnnnnnnnnnnnnnnnnnnnnnnnnnnnnnnnnnnnnnnnnnnnnnnnnnnnnnnnnnnnnnnnnnnnnnnnnnnnnnnnnnnnnnnnnnnnnnnnnnnnnnnnnnnnnnnnnnnnnnnnnnnnnnnnnnnnnnnnnnnnnnnnnnnnnnnnnnnnnnnnnnnnnnnnnnnnnnnnnnnnnnnnnnnnnnnnnnnnnnnnnnnnnnnnnnnnnnnnnnnnnnnnnnnnnnnnnnnnnnnnnnnnnnnnnnnnnnnnnnnnnnnnnnnnnnnnnnnnnnnnnnnnnnnnnnnnnnnnnnnnnnnnnnnnnnnnnnnnnnnnnnnnnnnnnnnnnnnnnnnnnnnnnnnnnnnnnnnnnnnnnnnnnnnnnnnnnnnnnnnnnnnnnnnnnnnnnnnnnnnnnnnnnnnnnnnnnnnnnnnnnnnnnnnnnnnnnnnnnnnnnnnnnnnnnnnnnnnnnnnnnnnnnnnnnnnnnnnnnnnnnnnnnnnnnnnnnnnnnnnnnnnnnnnnnnnnnnnnnnnnnnnnnnnnnnnnnnnnnnnnnnnnnnnnnnnnnnnnnnnnnnnnnnnnnnnnnnnnnnnnnnnnnnnnnnnnnnnnnnnnnnnnnnnnnnnnnnnnnnnnnnnnnnnnnnnnnnnnnnnnnnnnnnnnnnnnnnnnnnnnnnnnnnnnnnnnnnnnnnnnnnnnnnnnnnnnnnnnnnnnnnnnnnnnnnnnnnnnnnnnnnnnnnnnnnnnnnnnnnnnnnnnnnnnnnnnnnnnnnnnnnnnnnnnnnnnnnnnnnnnnnnnnnnnnnnnnnnnnnnnnnnnnnnnnnnnnnnnnnnnnnnnnnnnnnnnnnnnnnnnnnnnnnnnnnnnnnnnnnnnnnnnnnnnnnnnnnnnnnnnnnnnnnnnnnnnnnnnnnnnnnnnnnnnnnnnnnnnnnnnnnnnnnnnnnnnnnnnnnnnnnnnnnnnnnnnnnnnnnnnnnnnnnnnnnnnnnnnnnnnnnnnnnnnnnnnnnnnnnnnnnnnnnnnnnnnnnnnnnnnnnnnnnnnnnnnnnnnnnnnnnnnnnnnnnnnnnnnnnnnnnnnnnnnnnnnnnnnnnnnnnnnnnnnnnnnnnnnnnnnnnnnnnnnnnnnnnnnnnnnnnnnnnnnnnnnnnnnnnnnnnnnnnnnnnnnnnnnnnnnnnnnnnnnnnnnnnnnnnnnnnnnnnnnnnnnnnnnnnnnnnnnnnnnnnnnnnnnnnnnnnnnnnnnnnnnnnnnnnnnnnnnnnnnnnnnnnnnnnnnnnnnnnnnnnnnnnnnnnnnnnnnnnnnnnnnnnnnnnnnnnnnnnnnnnnnnnnnnnnnnnnnnnnnnnnnnnnnnnnnnnnnnnnnnnnnnnnnnnnnnnnnnnnnnnnnnnnnnnnnnnnnnnnnnnnnnnnnnnnnnnnnnnnnnnnnnnnnnnnnnnnnnnnnnnnnnnnnnnnnnnnnnnnnnnnnnnnnnnnnnnnnnnnnnnnnnnnnnnnnnnnnnnnnnnnnnnnnnnnnnnnnnnnnnnnnnnnnnnnnnnnnnnnnnnnnnnnnnnnnnnnnnnnnnnnnnnnnnnnnnnnnnnnnnnnnnnnnnnnnnnnnnnnnnnnnnnnnnnnnnnnnnnnnnnnnnnnnnnnnnnnnnnnnnnnnnnnnnnnnnnnnnnnnnnnnnnnnnnnnnnnnnnnnnnnnnnnnnnnnnnnnnnnnnnnnnnnnnnnnnnnnnnnnnnnnnnnnnnnnnnnnnnnnnnnnnnnnnnnnnnnnnnnnnnnnnnnnnnnnnnnnnnnnnnnnnnnnnnnnnnnnnnnnnnnnnnnnnnnnnnnnnnnnnnnnnnnnnnnnnnnnnnnnnnnnnnnnnnnnnnnnnnnnnnnnnnnnnnnnnnnnnnnnnnnnnnnnnnnnnnnnnnnnnnnnnnnnnnnnnnnnnnnnnnnnnnnnnnnnnnnnnnnnnnnnnnnnnnnnnnnnnnnnnnnnnnnnnnnnnnnnnnnnnnnnnnnnnnnnnnnnnnnnnnnnnnnnnnnnnnnnnnnnnnnnnnnnnnnnnnnnnnnnnnnnnnnnnnnnnnnnnnnnnnnnnnnnnnnnnnnnnnnnnnnnnnnnnnnnnnnnnnnnnnnnnnnnnnnnnnnnnnnnnnnnnnnnnnnnnnnnnnnnnnnnnnnnnnnnnnnnnnnnnnnnnnnnnnnnnnnnnnnnnnnnnnnnnnnnnnnnnnnnnnnnnnnnnnnnnnnnnnnnnnnnnnnnnnnnnnnnnnnnnnnnnnnnnnnnnnnnnnnnnnnnnnnnnnnnnnnnnnnnnnnnnnnnnnnnnnnnnnnnnnnnnnnnnnnnnnnnnnnnnnnnnnnnnnnnnnnnnnnnnnnnnnnnnnnnnnnnnnnnnnnnnnnnnnnnnnnnnnnnnnnnnnnnnnnnnnnnnnnnnnnnnnnnnnnnnnnnnnnnnnnnnnnnnnnnnnnnnnnnnnnnnnnnnnnnnnnnnnnnnnnnnnnnnnnnnnnnnnnnnnnnnnnnnnnnnnnnnnnnnnnnnnnnnnnnnnnnnnnnnnnnnnnnnnnnnnnnnnnnnnnnnnnnnnnnnnnnnnnnnnnnnnnnnnnnnnnnnnnnnnnnnnnnnnnnnnnnnnnnnnnnnnnnnnnnnnnnnnnnnnnnnnnnnnnnnnnnnnnnnnnnnnnnnnnnnnnnnnnnnnnnnnnnnnnnnnnnnnnnnnnnnnnnnnnnnnnnnnnnnnnnnnnnnnnnnnnnnnnnnnnnnnnnnnnnnnnnnnnnnnnnnnnnnnnnnnnnnnnnnnnnnnnnnnnnnnnnnnnnnnnnnnnnnnnnnnnnnnnnnnnnnnnnnnnnnnnnnnnnnnnnnnnnnnnnnnnnnnnnnnnnnnnnnnnnnnnnnnnnnnnnnnnnnnnnnnnnnnnnnnnnnnnnnnnnnnnnnnnnnnnnnnnnnnnnnnnnnnnnnnnnnnnnnnnnnnnnnnnnnnnnnnnnnnnnnnnnnnnnnnnnnnnnnnnnnnnnnnnnnnnnnnnnnnnnnnnnnnnnnnnnnnnnnnnnnnnnnnnnnnnnnnnnnnnnnnnnnnnnnnnnnnnnnnnnnnnnnnnnnnnnnnnnnnnnnnnnnnnnnnnnnnnnnnnnnnnnnnnnnnnnnnnnnnnnnnnnnnnnnnnnnnnnnnnnnnnnnnnnnnnnnnnnnnnnnnnnnnnnnnnnnnnnnnnnnnnnnnnnnnnnnnnnnnnnnnnnnnnnnnnnnnnnnnnnnnnnnnnnnnnnnnnnnnnnnnnnnnnnnnnnnnnnnnnnnnnnnnnnnnnnnnnnnnnnnnnnnnnnnnnnnnnnnnnnnnnnnnnnnnnnnnnnnnnnnnnnnnnnnnnnnnnnnnnnnnnnnnnnnnnnnnnnnnnnnnnnnnnnnnnnnnnnnnnnnnnnnnnnnnnnnnnnnnnnnnnnnnnnnnnnnnnnnnnnnnnnnnnnnnnnnnnnnnnnnnnnnnnnnnnnnnnnnnnnnnnnnnnnnnnnnnnnnnnnnnnnnnnnnnnnnnnnnnnnnnnnnnnnnnnnnnnnnnnnnnnnnnnnnnnnnnnnnnnnnnnnnnnnnnnnnnnnnnnnnnnnnnnnnnnnnnnnnnnnnnnnnnnnnnnnnnnnnnnnnnnnnnnnnnnnnnnnnnnnnnnnnnnnnnnnnnnnnnnnnnnnnnnnnnnnnnnnnnnnnnnnnnnnnnnnnnnnnnnnnnnnnnnnnnnnnnnnnnnnnnnnnnnnnnnnnnnnnnnnnnnnnnnnnnnnnnnnnnnnnnnnnnnnnnnnnnnnnnnnnnnnnnnnnnnnnnnnnnnnnnnnnnnnnnnnnnnnnnnnnnnnnnnnnnnnnnnnnnnnnnnnnnnnnnnnnnnnnnnnnnnnnnnnnnnnnnnnnnnnnnnnnnnnnnnnnnnnnnnnnnnnnnnnnnnnnnnnnnnnnnnnnnnnnnnnnnnnnnnnnnnnnnnnnnnnnnnnnnnnnnnnnnnnnnnnnnnnnnnnnnnnnnnnnnnnnnnnnnnnnnnnnnnnnnnnnnnnnnnnnnnnnnnnnnnnnnnnnnnnnnnnnnnnnnnnnnnnnnnnnnnnnnnnnnnnnnnnnnnnnnnnnnnnnnnnnnnnnnnnnnnnnnnnnnnnnnnnnnnnnnnnnnnnnnnnnnnnnnnnnnnnnnnnnnnnnnnnnnnnnnnnnnnnnnnnnnnnnnnnnnnnnnnnnnnnnnnnnnnnnnnnnnnnnnnnnnnnnnnnnnnnnnnnnnnnnnnnnnnnnnnnnnnnnnnnnnnnnnnnnnnnnnnnnnnnnnnnnnnnnnnnnnnnnnnnnnnnnnnnnnnnnnnnnnnnnnnnnnnnnnnnnnnnnnnnnnnnnnnnnnnnnnnnnnnnnnnnnnnnnnnnnnnnnnnnnnnnnnnnnnnnnnnnnnnnnnnnnnnnnnnnnnnnnnnnnnnnnnnnnnnnnnnnnnnnnnnnnnnnnnnnnnnnnnnnnnnnnnnnnnnnnnnnnnnnnnnnnnnnnnnnnnnnnnnnnnnnnnnnnnnnnnnnnnnnnnnnnnnnnnnnnnnnnnnnnnnnnnnnnnnnnnnnnnnnnnnnnnnnnnnnnnnnnnnnnnnnnnnnnnnnnnnnnnnnnnnnnnnnnnnnnnnnnnnnnnnnnnnnnnnnnnnnnnnnnnnnnnnnnnnnnnnnnnnnnnnnnnnnnnnnnnnnnnnnnnnnnnnnnnnnnnnnnnnnnnnnnnnnnnnnnnnnnnnnnnnnnnnnnnnnnnnnnnnnnnnnnnnnnnnnnnnnnnnnnnnnnnnnnnnnnnnnnnnnnnnnnnnnnnnnnnnnnnnnnnnnnnnnnnnnnnnnnnnnnnnnnnnnnnnnnnnnnnnnnnnnnnnnnnnnnnnnnnnnnnnnnnnnnnnnnnnnnnnnnnnnnnnnnnnnnnnnnnnnnnnnnnnnnnnnnnnnnnnnnnnnnnnnnnnnnnnnnnnnnnnnnnnnnnnnnnnnnnnnnnnnnnnnnnnnnnnnnnnnnnnnnnnnnnnnnnnnnnnnnnnnnnnnnnnnnnnnnnnnnnnnnnnnnnnnnnnnnnnnnnnnnnnnnnnnnnnnnnnnnnnnnnnnnnnnnnnnnnnnnnnnnnnnnnnnnnnnnnnnnnnnnnnnnnnnnnnnnnnnnnnnnnnnnnnnnnnnnnnnnnnnnnnnnnnnnnnnnnnnnnnnnnnnnnnnnnnnnnnnnnnnnnnnnnnnnnnnnnnnnnnnnnnnnnnnnnnnnnnnnnnnnnnnnnnnnnnnnnnnnnnnnnnnnnnnnnnnnnnnnnnnnnnnnnnnnnnnnnnnnnnnnnnnnnnnnnnnnnnnnnnnnnnnnnnnnnnnnnnnnnnnnnnnnnnnnnnnnnnnnnnnnnnnnnnnnnnnnnnnnnnnnnnnnnnnnnnnnnnnnnnnnnnnnnnnnnnnnnnnnnnnnnnnnnnnnnnnnnnnnnnnnnnnnnnnnnnnnnnnnnnnnnnnnnnnnnnnnnnnnnnnnnnnnnnnnnnnnnnnnnnnnnnnnnnnnnnnnnnnnnnnnnnnnnnnnnnnnnnnnnnnnnnnnnnnnnnnnnnnnnnnnnnnnnnnnnnnnnnnnnnnnnnnnnnnnnnnnnnnnnnnnnnnnnnnnnnnnnnnnnnnnnnnnnnnnnnnnnnnnnnnnnnnnnnnnnnnnnnnnnnnnnnnnnnnnnnnnnnnnnnnnnnnnnnnnnnnnnnnnnnnnnnnnnnnnnnnnnnnnnnnnnnnnnnnnnnnnnnnnnnnnnnnnnnnnnnnnnnnnnnnnnnnnnnnnnnnnnnnnnnnnnnnnnnnnnnnnnnnnnnnnnnnnnnnnnnnnnnnnnnnnnnnnnnnnnnnnnnnnnnnnnnnnnnnnnnnnnnnnnnnnnnnnnnnnnnnnnnnnnnnnnnnnnnnnnnnnnnnnnnnnnnnnnnnnnnnnnnnnnnnnnnnnnnnnnnnnnnnnnnnnnnnnnnnnnnnnnnnnnnnnnnnnnnnnnnnnnnnnnnnnnnnnnnnnnnnnnnnnnnnnnnnnnnnnnnnnnnnnnnnnnnnnnnnnnnnnnnnnnnnnnnnnnnnnnnnnnnnnnnnnnnnnnnnnnnnnnnnnnnnnnnnnnnnnnnnnnnnnnnnnnnnnnnnnnnnnnnnnnnnnnnnnnnnnnnnnnnnnnnnnnnnnnnnnnnnnnnnnnnnnnnnnnnnnnnnnnnnnnnnnnnnnnnnnnnnnnnnnnnnnnnnnnnnnnnnnnnnnnnnnnnnnnnnnnnnnnnnnnnnnnnnnnnnnnnnnnnnnnnnnnnnnnnnnnnnnnnnnnnnnnnnnnnnnnnnnnnnnnnnnnnnnnnnnnnnnnnnnnnnnnnnnnnnnnnnnnnnnnnnnnnnnnnnnnnnnnnnnnnnnnnnnnnnnnnnnnnnnnnnnnnnnnnnnnnnnnnnnnnnnnnnnnnnnnnnnnnnnnnnnnnnnnnnnnnnnnnnnnnnnnnnnnnnnnnnnnnnnnnnnnnnnnnnnnnnnnnnnnnnnnnnnnnnnnnnnnnnnnnnnnnnnnnnnnnnnnnnnnnnnnnnnnnnnnnnnnnnnnnnnnnnnnnnnnnnnnnnnnnnnnnnnnnnnnnnnnnnnnnnnnnnnnnnnnnnnnnnnnnnnnnnnnnnnnnnnnnnnnnnnnnnnnnnnnnnnnnnnnnnnnnnnnnnnnnnnnnnnnnnnnnnnnnnnnnnnnnnnnnnnnnnnnnnnnnnnnnnnnnnnnnnnnnnnnnnnnnnnnnnnnnnnnnnnnnnnnnnnnnnnnnnnnnnnnnnnnnnnnnnnnnnnnnnnnnnnnnnnnnnnnnnnnnnnnnnnnnnnnnnnnnnnnnnnnnnnnnnnnnnnnnnnnnnnnnnnnnnnnnnnnnnnnnnnnnnnnnnnnnnnnnnnnnnnnnnnnnnnnnnnnnnnnnnnnnnnnnnnnnnnnnnnnnnnnnnnnnnnnnnnnnnnnnnnnnnnnnnnnnnnnnnnnnnnnnnnnnnnnnnnnnnnnnnnnnnnnnnnnnnnnnnnnnnnnnnnnnnnnnnnnnnnnnnnnnnnnnnnnnnnnnnnnnnnnnnnnnnnnnnnnnnnnnnnnnnnnnnnnnnnnnnnnnnnnnnnnnnnnnnnnnnnnnnnnnnnnnnnnnnnnnnnnnnnnnnnnnnnnnnnnnnnnnnnnnnnnnnnnnnnnnnnnnnnnnnnnnnnnnnnnnnnnnnnnnnnnnnnnnnnnnnnnnnnnnnnnnnnnnnnnnnnnnnnnnnnnnnnnnnnnnnnnnnnnnnnnnnnnnnnnnnnnnnnnnnnnnnnnnnnnnnnnnnnnnnnnnnnnnnnnnnnnnnnnnnnnnnnnnnnnnnnnnnnnnnnnnnnnnnnnnnnnnnnnnnnnnnnnnnnnnnnnnnnnnnnnnnnnnnnnnnnnnnnnnnnnnnnnnnnnnnnnnnnnnnnnnnnnnnnnnnnnnnnnnnnnnnnnnnnnnnnnnnnnnnnnnnnnnnnnnnnnnnnnnnnnnnnnnnnnnnnnnnnnnnnnnnnnnnnnnnnnnnnnnnnnnnnnnnnnnnnnnnnnnnnnnnnnnnnnnnnnnnnnnnnnnnnnnnnnnnnnnnnnnnnnnnnnnnnnnnnnnnnnnnnnnnnnnnnnnnnnnnnnnnnnnnnnnnnnnnnnnnnnnnnnnnnnnnnnnnnnnnnnnnnnnnnnnnnnnnnnnnnnnnnnnnnnnnnnnnnnnnnnnnnnnnnnnnnnnnnnnnnnnnnnnnnnnnnnnnnnnnnnnnnnnnnnnnnnnnnnnnnnnnnnnnnnnnnnnnnnnnnnnnnnnnnnnnnnnnnnnnnnnnnnnnnnnnnnnnnnnnnnnnnnnnnnnnnnnnnnnnnnnnnnnnnnnnnnnnnnnnnnnnnnnnnnnnnnnnnnnnnnnnnnnnnnnnnnnnnnnnnnnnnnnnnnnnnnnnnnnnnnnnnnnnnnnnnnnnnnnnnnnnnnnnnnnnnnnnnnnnnnnnnnnnnnnnnnnnnnnnnnnnnnnnnnnnnnnnnnnnnnnnnnnnnnnnnnnnnnnnnnnnnnnnnnnnnnnnnnnnnnnnnnnnnnnnnnnnnnnnnnnnnnnnnnnnnnnnnnnnnnnnnnnnnnnnnnnnnnnnnnnnnnnnnnnnnnnnnnnnnnnnnnnnnnnnnnnnnnnnnnnnnnnnnnnnnnnnnnnnnnnnnnnnnnnnnnnnnnnnnnnnnnnnnnnnnnnnnnnnnnnnnnnnnnnnnnnnnnnnnnnnnnnnnnnnnnnnnnnnnnnnnnnnnnnnnnnnnnnnnnnnnnnnnnnnnnnnnnnnnnnnnnnnnnnnnnnnnnnnnnnnnnnnnnnnnnnnnnnnnnnnnnnnnnnnnnnnnnnnnnnnnnnnnnnnnnnnnnnnnnnnnnnnnnnnnnnnnnnnnnnnnnnnnnnnnnnnnnnnnnnnnnnnnnnnnnnnnnnnnnnnnnnnnnnnnnnnnnnnnnnnnnnnnnnnnnnnnnnnnnnnnnnnnnnnnnnnnnnnnnnnnnnnnnnnnnnnnnnnnnnnnnnnnnnnnnnnnnnnnnnnnnnnnnnnnnnnnnnnnnnnnnnnnnnnnnnnnnnnnnnnnnnnnnnnnnnnnnnnnnnnnnnnnnnnnnnnnnnnnnnnnnnnnnnnnnnnnnnnnnnnnnnnnnnnnnnnnnnnnnnnnnnnnnnnnnnnnnnnnnnnnnnnnnnnnnnnnnnnnnnnnnnnnnnnnnnnnnnnnnnnnnnnnnnnnnnnnnnnnnnnnnnnnnnnnnnnnnnnnnnnnnnnnnnnnnnnnnnnnnnnnnnnnnnnnnnnnnnnnnnnnnnnnnnnnnnnnnnnnnnnnnnnnnnnnnnnnnnnnnnnnnnnnnnnnnnnnnnnnnnnnnnnnnnnnnnnnnnnnnnnnnnnnnnnnnnnnnnnnnnnnnnnnnnnnnnnnnnnnnnnnnnnnnnnnnnnnnnnnnnnnnnnnnnnnnnnnnnnnnnnnnnnnnnnnnnnnnnnnnnnnnnnnnnnnnnnnnnnnnnnnnnnnnnnnnnnnnnnnnnnnnnnnnnnnnnnnnnnnnnnnnnnnnnnnnnnnnnnnnnnnnnnnnnnnnnnnnnnnnnnnnnnnnnnnnnnnnnnnnnnnnnnnnnnnnnnnnnnnnnnnnnnnnnnnnnnnnnnnnnnnnnnnnnnnnnnnnnnnnnnnnnnnnnnnnnnnnnnnnnnnnnnnnnnnnnnnnnnnnnnnnnnnnnnnnnnnnnnnnnnnnnnnnnnnnnnnnnnnnnnnnnnnnnnnnnnnnnnnnnnnnnnnnnnnnnnnnnnnnnnnnnnnnnnnnnnnnnnnnnnnnnnnnnnnnnnnnnnnnnnnnnnnnnnnnnnnnnnnnnnnnnnnnnnnnnnnnnnnnnnnnnnnnnnnnnnnnnnnnnnnnnnnnnnnnnnnnnnnnnnnnnnnnnnnnnnnnnnnnnnnnnnnnnnnnnnnnnnnnnnnnnnnnnnnnnnnnnnnnnnnnnnnnnnnnnnnnnnnnnnnnnnnnnnnnnnnnnnnnnnnnnnnnnnnnnnnnnnnnnnnnnnnnnnnnnnnnnnnnnnnnnnnnnnnnnnnnnnnnnnnnnnnnnnnnnnnnnnnnnnnnnnnnnnnnnnnnnnnnnnnnnnnnnnnnnnnnnnnnnnnnnnnnnnnnnnnnnnnnnnnnnnnnnnnnnnnnnnnnnnnnnnnnnnnnnnnnnnnnnnnnnnnnnnnnnnnnnnnnnnnnnnnnnnnnnnnnnnnnnnnnnnnnnnnnnnnnnnnnnnnnnnnnnnnnnnnnnnnnnnnnnnnnnnnnnnnnnnnnnnnnnnnnnnnnnnnnnnnnnnnnnnnnnnnnnnnnnnnnnnnnnnnnnnnnnnnnnnnnnnnnnnnnnnnnnnnnnnnnnnnnnnnnnnnnnnnnnnnnnnnnnnnnnnnnnnnnnnnnnnnnnnnnnnnnnnnnnnnnnnnnnnnnnnnnnnnnnnnnnnnnnnnnnnnnnnnnnnnnnnnnnnnnnnnnnnnnnnnnnnnnnnnnnnnnnnnnnnnnnnnnnnnnnnnnnnnnnnnnnnnnnnnnnnnnnnnnnnnnnnnnnnnnnnnnnnnnnnnnnnnnnnnnnnnnnnnnnnnnnnnnnnnnnnnnnnnnnnnnnnnnnnnnnnnnnnnnnnnnnnnnnnnnnnnnnnnnnnnnnnnnnnnnnnnnnnnnnnnnnnnnnnnnnnnnnnnnnnnnnnnnnnnnnnnnnnnnnnnnnnnnnnnnnnnnnnnnnnnnnnnnnnnnnnnnnnnnnnnnnnnnnnnnnnnnnnnnnnnnnnnnnnnnnnnnnnnnnnnnnnnnnnnnnnnnnnnnnnnnnnnnnnnnnnnnnnnnnnnnnnnnnnnnnnnnnnnnnnnnnnnnnnnnnnnnnnnnnnnnnnnnnnnnnnnnnnnnnnnnnnnnnnnnnnnnnnnnnnnnnnnnnnnnnnnnnnnnnnnnnnnnnnnnnnnnnnnnnnnnnnnnnnnnnnnnnnnnnnnnnnnnnnnnnnnnnnnnnnnnnnnnnnnnnnnnnnnnnnnnnnnnnnnnnnnnnnnnnnnnnnnnnnnnnnnnnnnnnnnnnnnnnnnnnnnnnnnnnnnnnnnnnnnnnnnnnnnnnnnnnnnnnnnnnnnnnnnnnnnnnnnnnnnnnnnnnnnnnnnnnnnnnnnnnnnnnnnnnnnnnnnnnnnnnnnnnnnnnnnnnnnnnnnnnnnnnnnnnnnnnnnnnnnnnnnnnnnnnnnnnnnnnnnnnnnnnnnnnnnnnnnnnnnnnnnnnnnnnnnnnnnnnnnnnnnnnnnnnnnnnnnnnnnnnnnnnnnnnnnnnnnnnnnnnnnnnnnnnnnnnnnnnnnnnnnnnnnnnnnnnnnnnnnnnnnnnnnnnnnnnnnnnnnnnnnnnnnnnnnnnnnnnnnnnnnnnnnnnnnnnnnnnnnnnnnnnnnnnnnnnnnnnnnnnnnnnnnnnnnnnnnnnnnnnnnnnnnnnnnnnnnnnnnnnnnnnnnnnnnnnnnnnnnnnnnnnnnnnnnnnnnnnnnnnnnnnnnnnnnnnnnnnnnnnnnnnnnnnnnnnnnnnnnnnnnnnnnnnnnnnnnnnnnnnnnnnnnnnnnnnnnnnnnnnnnnnnnnnnnnnnnnnnnnnnnnnnnnnnnnnnnnnnnnnnnnnnnnnnnnnnnnnnnnnnnnnnnnnnnnnnnnnnnnnnnnnnnnnnnnnnnnnnnnnnnnnnnnnnnnnnnnnnnnnnnnnnnnnnnnnnnnnnnnnnnnnnnnnnnnnnnnnnnnnnnnnnnnnnnnnnnnnnnnnnnnnnnnnnnnnnnnnnnnnnnnnnnnnnnnnnnnnnnnnnnnnnnnnnnnnnnnnnnnnnnnnnnnnnnnnnnnnnnnnnnnnnnnnnnnnnnnnnnnnnnnnnnnnnnnnnnnnnnnnnnnnnnnnnnnnnnnnnnnnnnnnnnnnnnnnnnnnnnnnnnnnnnnnnnnnnnnnnnnnnnnnnnnnnnnnnnnnnnnnnnnnnnnnnnnnnnnnnnnnnnnnnnnnnnnnnnnnnnnnnnnnnnnnnnnnnnnnnnnnnnnnnnnnnnnnnnnnnnnnnnnnnnnnnnnnnnnnnnnnnnnnnnnnnnnnnnnnnnnnnnnnnnnnnnnnnnnnnnnnnnnnnnnnnnnnnnnnnnnnnnnnnnnnnnnnnnnnnnnnnnnnnnnnnnnnnnnnnnnnnnnnnnnnnnnnnnnnnnnnnnnnnnnnnnnnnnnnnnnnnnnnnnnnnnnnnnnnnnnnnnnnnnnnnnnnnnnnnnnnnnnnnnnnnnnnnnnnnnnnnnnnnnnnnnnnnnnnnnnnnnnnnnnnnnnnnnnnnnnnnnnnnnnnnnnnnnnnnnnnnnnnnnnnnnnnnnnnnnnnnnnnnnnnnnnnnnnnnnnnnnnnnnnnnnnnnnnnnnnnnnnnnnnnnnnnnnnnnnnnnnnnnnnnnnnnnnnnnnnnnnnnnnnnnnnnnnnnnnnnnnnnnnnnnnnnnnnnnnnnnnnnnnnnnnnnnnnnnnnnnnnnnnnnnnnnnnnnnnnnnnnnnnnnnnnnnnnnnnnnnnnnnnnnnnnnnnnnnnnnnnnnnnnnnnnnnnnnnnnnnnnnnnnnnnnnnnnnnnnnnnnnnnnnnnnnnnnnnnnnnnnnnnnnnnnnnnnnnnnnnnnnnnnnnnnnnnnnnnnnnnnnnnnnnnnnnnnnnnnnnnnnnnnnnnnnnnnnnnnnnnnnnnnnnnnnnnnnnnnnnnnnnnnnnnnnnnnnnnnnnnnnnnnnnnnnnnnnnnnnnnnnnnnnnnnnnnnnnnnnnnnnnnnnnnnnnnnnnnnnnnnnnnnnnnnnnnnnnnnnnnnnnnnnnnnnnnnnnnnnnnnnnnnnnnnnnnnnnnnnnnnnnnnnnnnnnnnnnnnnnnnnnnnnnnnnnnnnnnnnnnnnnnnnnnnnnnnnnnnnnnnnnnnnnnnnnnnnnnnnnnnnnnnnnnnnnnnnnnnnnnnnnnnnnnnnnnnnnnnnnnnnnnnnnnnnnnnnnnnnnnnnnnnnnnnnnnnnnnnnnnnnnnnnnnnnnnnnnnnnnnnnnnnnnnnnnnnnnnnnnnnnnnnnnnnnnnnnnnnnnnnnnnnnnnnnnnnnnnnnnnnnnnnnnnnnnnnnnnnnnnnnnnnnnnnnnnnnnnnnnnnnnnnnnnnnnnnnnnnnnnnnnnnnnnnnnnnnnnnnnnnnnnnnnnnnnnnnnnnnnnnnnnnnnnnnnnnnnnnnnnnnnnnnnnnnnnnnnnnnnnnnnnnnnnnnnnnnnnnnnnnnnnnnnnnnnnnnnnnnnnnnnnnnnnnnnnnnnnnnnnnnnnnnnnnnnnnnnnnnnnnnnnnnnnnnnnnnnnnnnnnnnnnnnnnnnnnnnnnnnnnnnnnnnnnnnnnnnnnnnnnnnnnnnnnnnnnnnnnnnnnnnnnnnnnnnnnnnnnnnnnnnnnnnnnnnnnnnnnnnnnnnnnnnnnnnnnnnnnnnnnnnnnnnnnnnnnnnnnnnnnnnnnnnnnnnnnnnnnnnnnnnnnnnnnnnnnnnnnnnnnnnnnnnnnnnnnnnnnnnnnnnnnnnnnnnnnnnnnnnnnnnnnnnnnnnnnnnnnnnnnnnnnnnnnnnnnnnnnnnnnnnnnnnnnnnnnnnnnnnnnnnnnnnnnnnnnnnnnnnnnnnnnnnnnnnnnnnnnnnnnnnnnnnnnnnnnnnnnnnnnnnnnnnnnnnnnnnnnnnnnnnnnnnnnnnnnnnnnnnnnnnnnnnnnnnnnnnnnnnnnnnnnnnnnnnnnnnnnnnnnnnnnnnnnnnnnnnnnnnnnnnnnnnnnnnnnnnnnnnnnnnnnnnnnnnnnnnnnnnnnnnnnnnnnnnnnnnnnnnnnnnnnnnnnnnnnnnnnnnnnnnnnnnnnnnnnnnnnnnnnnnnnnnnnnnnnnnnnnnnnnnnnnnnnnnnnnnnnnnnnnnnnnnnnnnnnnnnnnnnnnnnnnnnnnnnnnnnnnnnnnnnnnnnnnnnnnnnnnnnnnnnnnnnnnnnnnnnnnnnnnnnnnnnnnnnnnnnnnnnnnnnnnnnnnnnnnnnnnnnnnnnnnnnnnnnnnnnnnnnnnnnnnnnnnnnnnnnnnnnnnnnnnnnnnnnnnnnnnnnnnnnnnnnnnnnnnnnnnnnnnnnnnnnnnnnnnnnnnnnnnnnnnnnnnnnnnnnnnnnnnnnnnnnnnnnnnnnnnnnnnnnnnnnnnnnnnnnnnnnnnnnnnnnnnnnnnnnnnnnnnnnnnnnnnnnnnnnnnnnnnnnnnnnnnnnnnnnnnnnnnnnnnnnnnnnnnnnnnnnnnnnnnnnnnnnnnnnnnnnnnnnnnnnnnnnnnnnnnnnnnnnnnnnnnnnnnnnnnnnnnnnnnnnnnnnnnnnnnnnnnnnnnnnnnnnnnnnnnnnnnnnnnnnnnnnnnnnnnnnnnnnnnnnnnnnnnnnnnnnnnnnnnnnnnnnnnnnnnnnnnnnnnnnnnnnnnnnnnnnnnnnnnnnnnnnnnnnnnnnnnnnnnnnnnnnnnnnnnnnnnnnnnnnnnnnnnnnnnnnnnnnnnnnnnnnnnnnnnnnnnnnnnnnnnnnnnnnnnnnnnnnnnnnnnnnnnnnnnnnnnnnnnnnnnnnnnnnnnnnnnnnnnnnnnnnnnnnnnnnnnnnnnnnnnnnnnnnnnnnnnnnnnnnnnnnnnnnnnnnnnnnnnnnnnnnnnnnnnnnnnnnnnnnnnnnnnnnnnnnnnnnnnnnnnnnnnnnnnnnnnnnnnnnnnnnnnnnnnnnnnnnnnnnnnnnnnnnnnnnnnnnnnnnnnnnnnnnnnnnnnnnnnnnnnnnnnnnnnnnnnnnnnnnnnnnnnnnnnnnnnnnnnnnnnnnnnnnnnnnnnnnnnnnnnnnnnnnnnnnnnnnnnnnnnnnnnnnnnnnnnnnnnnnnnnnnnnnnnnnnnnnnnnnnnnnnnnnnnnnnnnnnnnnnnnnnnnnnnnnnnnnnnnnnnnnnnnnnnnnnnnnnnnnnnnnnnnnnnnnnnnnnnnnnnnnnnnnnnnnnnnnnnnnnnnnnnnnnnnnnnnnnnnnnnnnnnnnnnnnnnnnnnnnnnnnnnnnnnnnnnnnnnnnnnnnnnnnnnnnnnnnnnnnnnnnnnnnnnnnnnnnnnnnnnnnnnnnnnnnnnnnnnnnnnnnnnnnnnnnnnnnnnnnnnnnnnnnnnnnnnnnnnnnnnnnnnnnnnnnnnnnnnnnnnnnnnnnnnnnnnnnnnnnnnnnnnnnnnnnnnnnnnnnnnnnnnnnnnnnnnnnnnnnnnnnnnnnnnnnnnnnnnnnnnnnnnnnnnnnnnnnnnnnnnnnnnnnnnnnnnnnnnnnnnnnnnnnnnnnnnnnnnnnnnnnnnnnnnnnnnnnnnnnnnnnnnnnnnnnnnnnnnnnnnnnnnnnnnnnnnnnnnnnnnnnnnnnnnnnnnnnnnnnnnnnnnnnnnnnnnnnnnnnnnnnnnnnnnnnnnnnnnnnnnnnnnnnnnnnnnnnnnnnnnnnnnnnnnnnnnnnnnnnnnnnnnnnnnnnnnnnnnnnnnnnnnnnnnnnnnnnnnnnnnnnnnnnnnnnnnnnnnnnnnnnnnnnnnnnnnnnnnnnnnnnnnnnnnnnnnnnnnnnnnnnnnnnnnnnnnnnnnnnnnnnnnnnnnnnnnnnnnnnnnnnnnnnnnnnnnnnnnnnnnnnnnnnnnnnnnnnnnnnnnnnnnnnnnnnnnnnnnnnnnnnnnnnnnnnnnnnnnnnnnnnnnnnnnnnnnnnnnnnnnnnnnnnnnnnnnnnnnnnnnnnnnnnnnnnnnnnnnnnnnnnnnnnnnnnnnnnnnnnnnnnnnnnnnnnnnnnnnnnnnnnnnnnnnnnnnnnnnnnnnnnnnnnnnnnnnnnnnnnnnnnnnnnnnnnnnnnnnnnnnnnnnnnnnnnnnnnnnnnnnnnnnnnnnnnnnnnnnnnnnnnnnnnnnnnnnnnnnnnnnnnnnnnnnnnnnnnnnnnnnnnnnnnnnnnnnnnnnnnnnnnnnnnnnnnnnnnnnnnnnnnnnnnnnnnnnnnnnnnnnnnnnnnnnnnnnnnnnnnnnnnnnnnnnnnnnnnnnnnnnnnnnnnnnnnnnnnnnnnnnnnnnnnnnnnnnnnnnnnnnnnnnnnnnnnnnnnnnnnnnnnnnnnnnnnnnnnnnnnnnnnnnnnnnnnnnnnnnnnnnnnnnnnnnnnnnnnnnnnnnnnnnnnnnnnnnnnnnnnnnnnnnnnnnnnnnnnnnnnnnnnnnnnnnnnnnnnnnnnnnnnnnnnnnnnnnnnnnnnnnnnnnnnnnnnnnnnnnnnnnnnnnnnnnnnnnnnnnnnnnnnnnnnnnnnnnnnnnnnnnnnnnnnnnnnnnnnnnnnnnnnnnnnnnnnnnnnnnnnnnnnnnnnnnnnnnnnnnnnnnnnnnnnnnnnnnnnnnnnnnnnnnnnnnnnnnnnnnnnnnnnnnnnnnnnnnnnnnnnnnnnnnnnnnnnnnnnnnnnnnnnnnnnnnnnnnnnnnnnnnnnnnnnnnnnnnnnnnnnnnnnnnnnnnnnnnnnnnnnnnnnnnnnnnnnnnnnnnnnnnnnnnnnnnnnnnnnnnnnnnnnnnnnnnnnnnnnnnnnnnnnnnnnnnnnnnnnnnnnnnnnnnnnnnnnnnnnnnnnnnnnnnnnnnnnnnnnnnnnnnnnnnnnnnnnnnnnnnnnnnnnnnnnnnnnnnnnnnnnnnnnnnnnnnnnnnnnnnnnnnnnnnnnnnnnnnnnnnnnnnnnnnnnnnnnnnnnnnnnnnnnnnnnnnnnnnnnnnnnnnnnnnnnnnnnnnnnnnnnnnnnnnnnnnnnnnnnnnnnnnnnnnnnnnnnnnnnnnnnnnnnnnnnnnnnnnnnnnnnnnnnnnnnnnnnnnnnnnnnnnnnnnnnnnnnnnnnnnnnnnnnnnnnnnnnnnnnnnnnnnnnnnnnnnnnnnnnnnnnnnnnnnnnnnnnnnnnnnnnnnnnnnnnnnnnnnnnnnnnnnnnnnnnnnnnnnnnnnnnnnnnnnnnnnnnnnnnnnnnnnnnnnnnnnnnnnnnnnnnnnnnnnnnnnnnnnnnnnnnnnnnnnnnnnnnnnnnnnnnnnnnnnnnnnnnnnnnnnnnnnnnnnnnnnnnnnnnnnnnnnnnnnnnnnnnnnnnnnnnnnnnnnnnnnnnnnnnnnnnnnnnnnnnnnnnnnnnnnnnnnnnnnnnnnnnnnnnnnnnnnnnnnnnnnnnnnnnnnnnnnnnnnnnnnnnnnnnnnnnnnnnnnnnnnnnnnnnnnnnnnnnnnnnnnnnnnnnnnnnnnnnnnnnnnnnnnnnnnnnnnnnnnnnnnnnnnnnnnnnnnnnnnnnnnnnnnnnnnnnnnnnnnnnnnnnnnnnnnnnnnnnnnnnnnnnnnnnnnnnnnnnnnnnnnnnnnnnnnnnnnnnnnnnnnnnnnnnnnnnnnnnnnnnnnnnnnnnnnnnnnnnnnnnnnnnnnnnnnnnnnnnnnnnnnnnnnnnnnnnnnnnnnnnnnnnnnnnnnnnnnnnnnnnnnnnnnnnnnnnnnnnnnnnnnnnnnnnnnnnnnnnnnnnnnnnnnnnnnnnnnnnnnnnnnnnnnnnnnnnnnnnnnnnnnnnnnnnnnnnnnnnnnnnnnnnnnnnnnnnnnnnnnnnnnnnnnnnnnnnnnnnnnnnnnnnnnnnnnnnnnnnnnnnnnnnnnnnnnnnnnnnnnnnnnnnnnnnnnnnnnnnnnnnnnnnnnnnnnnnnnnnnnnnnnnnnnnnnnnnnnnnnnnnnnnnnnnnnnnnnnnnnnnnnnnnnnnnnnnnnnnnnnnnnnnnnnnnnnnnnnnnnnnnnnnnnnnnnnnnnnnnnnnnnnnnnnnnnnnnnnnnnnnnnnnnnnnnnnnnnnnnnnnnnnnnnnnnnnnnnnnnnnnnnnnnnnnnnnnnnnnnnnnnnnnnnnnnnnnnnnnnnnnnnnnnnnnnnnnnnnnnnnnnnnnnnnnnnnnnnnnnnnnnnnnnnnnnnnnnnnnnnnnnnnnnnnnnnnnnnnnnnnnnnnnnnnnnnnnnnnnnnnnnnnnnnnnnnnnnnnnnnnnnnnnnnnnnnnnnnnnnnnnnnnnnnnnnnnnnnnnnnnnnnnnnnnnnnnnnnnnnnnnnnnnnnnnnnnnnnnnnnnnnnnnnnnnnnnnnnnnnnnnnnnnnnnnnnnnnnnnnnnnnnnnnnnnnnnnnnnnnnnnnnnnnnnnnnnnnnnnnnnnnnnnnnnnnnnnnnnnnnnnnnnnnnnnnnnnnnnnnnnnnnnnnnnnnnnnnnnnnnnnnnnnnnnnnnnnnnnnnnnnnnnnnnnnnnnnnnnnnnnnnnnnnnnnnnnnnnnnnnnnnnnnnnnnnnnnnnnnnnnnnnnnnnnnnnnnnnnnnnnnnnnnnnnnnnnnnnnnnnnnnnnnnnnnnnnnnnnnnnnnnnnnnnnnnnnnnnnnnnnnnnnnnnnnnnnnnnnnnnnnnnnnnnnnnnnnnnnnnnnnnnnnnnnnnnnnnnnnnnnnnnnnnnnnnnnnnnnnnnnnnnnnnnnnnnnnnnnnnnnnnnnnnnnnnnnnnnnnnnnnnnnnnnnnnnnnnnnnnnnnnnnnnnnnnnnnnnnnnnnnnnnnnnnnnnnnnnnnnnnnnnnnnnnnnnnnnnnnnnnnnnnnnnnnnnnnnnnnnnnnnnnnnnnnnnnnnnnnnnnnnnnnnnnnnnnnnnnnnnnnnnnnnnnnnnnnnnnnnnnnnnnnnnnnnnnnnnnnnnnnnnnnnnnnnnnnnnnnnnnnnnnnnnnnnnnnnnnnnnnnnnnnnnnnnnnnnnnnnnnnnnnnnnnnnnnnnnnnnnnnnnnnnnnnnnnnnnnnnnnnnnnnnnnnnnnnnnnnnnnnnnnnnnnnnnnnnnnnnnnnnnnnnnnnnnnnnnnnnnnnnnnnnnnnnnnnnnnnnnnnnnnnnnnnnnnnnnnnnnnnnnnnnnnnnnnnnnnnnnnnnnnnnnnnnnnnnnnnnnnnnnnnnnnnnnnnnnnnnnnnnnnnnnnnnnnnnnnnnnnnnnnnnnnnnnnnnnnnnnnnnnnnnnnnnnnnnnnnnnnnnnnnnnnnnnnnnnnnnnnnnnnnnnnnnnnnnnnnnnnnnnnnnnnnnnnnnnnnnnnnnnnnnnnnnnnnnnnnnnnnnnnnnnnnnnnnnnnnnnnnnnnnnnnnnnnnnnnnnnnnnnnnnnnnnnnnnnnnnnnnnnnnnnnnnnnnnnnnnnnnnnnnnnnnnnnnnnnnnnnnnnnnnnnnnnnnnnnnnnnnnnnnnnnnnnnnnnnnnnnnnnnnnnnnnnnnnnnnnnnnnnnnnnnnnnnnnnnnnnnnnnnnnnnnnnnnnnnnnnnnnnnnnnnnnnnnnnnnnnnnnnnnnnnnnnnnnnnnnnnnnnnnnnnnnnnnnnnnnnnnnnnnnnnnnnnnnnnnnnnnnnnnnnnnnnnnnnnnnnnnnnnnnnnnnnnnnnnnnnnnnnnnnnnnnnnnnnnnnnnnnnnnnnnnnnnnnnnnnnnnnnnnnnnnnnnnnnnnnnnnnnnnnnnnnnnnnnnnnnnnnnnnnnnnnnnnnnnnnnnnnnnnnnnnnnnnnnnnnnnnnnnnnnnnnnnnnnnnnnnnnnnnnnnnnnnnnnnnnnnnnnnnnnnnnnnnnnnnnnnnnnnnnnnnnnnnnnnnnnnnnnnnnnnnnnnnnnnnnnnnnnnnnnnnnnnnnnnnnnnnnnnnnnnnnnnnnnnnnnnnnnnnnnnnnnnnnnnnnnnnnnnnnnnnnnnnnnnnnnnnnnnnnnnnnnnnnnnnnnnnnnnnnnnnnnnnnnnnnnnnnnnnnnnnnnnnnnnnnnnnnnnnnnnnnnnnnnnnnnnnnnnnnnnnnnnnnnnnnnnnnnnnnnnnnnnnnnnnnnnnnnnnnnnnnnnnnnnnnnnnnnnnnnnnnnnnnnnnnnnnnnnnnnnnnnnnnnnnnnnnnnnnnnnnnnnnnnnnnnnnnnnnnnnnnnnnnnnnnnnnnnnnnnnnnnnnnnnnnnnnnnnnnnnnnnnnnnnnnnnnnnnnnnnnnnnnnnnnnnnnnnnnnnnnnnnnnnnnnnnnnnnnnnnnnnnnnnnnnnnnnnnnnnnnnnnnnnnnnnnnnnnnnnnnnnnnnnnnnnnnnnnnnnnnnnnnnnnnnnnnnnnnnnnnnnnnnnnnnnnnnnnnnnnnnnnnnnnnnnnnnnnnnnnnnnnnnnnnnnnnnnnnnnnnnnnnnnnnnnnnnnnnnnnnnnnnnnnnnnnnnnnnnnnnnnnnnnnnnnnnnnnnnnnnnnnnnnnnnnnnnnnnnnnnnnnnnnnnnnnnnnnnnnnnnnnnnnnnnnnnnnnnnnnnnnnnnnnnnnnnnnnnnnnnnnnnnnnnnnnnnnnnnnnnnnnnnnnnnnnnnnnnnnnnnnnnnnnnnnnnnnnnnnnnnnnnnnnnnnnnnnnnnnnnnnnnnnnnnnnnnnnnnnnnnnnnnnnnnnnnnnnnnnnnnnnnnnnnnnnnnnnnnnnnnnnnnnnnnnnnnnnnnnnnnnnnnnnnnnnnnnnnnnnnnnnnnnnnnnnnnnnnnnnnnnnnnnnnnnnnnnnnnnnnnnnnnnnnnnnnnnnnnnnnnnnnnnnnnnnnnnnnnnnnnnnnnnnnnnnnnnnnnnnnnnnnnnnnnnnnnnnnnnnnnnnnnnnnnnnnnnnnnnnnnnnnnnnnnnnnnnnnnnnnnnnnnnnnnnnnnnnnnnnnnnnnnnnnnnnnnnnnnnnnnnnnnnnnnnnnnnnnnnnnnnnnnnnnnnnnnnnnnnnnnnnnnnnnnnnnnnnnnnnnnnnnnnnnnnnnnnnnnnnnnnnnnnnnnnnnnnnnnnnnnnnnnnnnnnnnnnnnnnnnnnnnnnnnnnnnnnnnnnnnnnnnnnnnnnnnnnnnnnnnnnnnnnnnnnnnnnnnnnnnnnnnnnnnnnnnnnnnnnnnnnnnnnnnnnnnnnnnnnnnnnnnnnnnnnnnnnnnnnnnnnnnnnnnnnnnnnnnnnnnnnnnnnnnnnnnnnnnnnnnnnnnnnnnnnnnnnnnnnnnnnnnnnnnnnnnnnnnnnnnnnnnnnnnnnnnnnnnnnnnnnnnnnnnnnnnnnnnnnnnnnnnnnnnnnnnnnnnnnnnnnnnnnnnnnnnnnnnnnnnnnnnnnnnnnnnnnnnnnnnnnnnnnnnnnnnnnnnnnnnnnnnnnnnnnnnnnnnnnnnnnnnnnnnnnnnnnnnnnnnnnnnnnnnnnnnnnnnnnnnnnnnnnnnnnnnnnnnnnnnnnnnnnnnnnnnnnnnnnnnnnnnnnnnnnnnnnnnnnnnnnnnnnnnnnnnnnnnnnnnnnnnnnnnnnnnnnnnnnnnnnnnnnnnnnnnnnnnnnnnnnnnnnnnnnnnnnnnnnnnnnnnnnnnnnnnnnnnnnnnnnnnnnnnnnnnnnnnnnnnnnnnnnnnnnnnnnnnnnnnnnnnnnnnnnnnnnnnnnnnnnnnnnnnnnnnnnnnnnnnnnnnnnnnnnnnnnnnnnnnnnnnnnnnnnnnnnnnnnnnnnnnnnnnnnnnnnnnnnnnnnnnnnnnnnnnnnnnnnnnnnnnnnnnnnnnnnnnnnnnnnnnnnnnnnnnnnnnnnnnnnnnnnnnnnnnnnnnnnnnnnnnnnnnnnnnnnnnnnnnnnnnnnnnnnnnnnnnnnnnnnnnnnnnnnnnnnnnnnnnnnnnnnnnnnnnnnnnnnnnnnnnnnnnnnnnnnnnnnnnnnnnnnnnnnnnnnnnnnnnnnnnnnnnnnnnnnnnnnnnnnnnnnnnnnnnnnnnnnnnnnnnnnnnnnnnnnnnnnnnnnnnnnnnnnnnnnnnnnnnnnnnnnnnnnnnnnnnnnnnnnnnnnnnnnnnnnnnnnnnnnnnnnnnnnnnnnnnnnnnnnnnnnnnnnnnnnnnnnnnnnnnnnnnnnnnnnnnnnnnnnnnnnnnnnnnnnnnnnnnnnnnnnnnnnnnnnnnnnnnnnnnnnnnnnnngtgagcgagaccggaaggaccgtgaacggaggctgagtcctcgtccgaccgtcaaaaaccccgtccggacggcccagggccaagcccgaccaccccactcacggattcggggtcgcctttttaagggatcgagccgcagcgcccgcggcgagcacgagagcagcaggaatctgaggaggtaccgtgtggacgccaaggtcatcgggttcaagctagaacgggagaccaagaacacggtgcggtacgaagaagagaccgcagggcaaccacctgcagtcggtacgctatatgtgcaaaagtgggcgctcggcactccggtcccagcgcgtttgaaactgacgctagaggtcgtaggataggccgctgtagacacgacgttgcaatagtgctttgttcgcccaagcgagagttcggtctcaatggtggaaacaaaggattccttcgtcttcctgatcgctacctgactcccaagattccctctcttttgactttagtgcttagttgcagaagaccgttccctgaggctctcgaagggaacggggcgtttccacgaggagctgaatgaacgctattatttgccacttagcactagttgatccgtttggaccgagctaggactacgcatcgatttcctcattcgatttgtcagctttcttgtttacgtaagcgggtacgctgttctctggaagtgcctttccaagggctgactggttggagacggaagcctcaacagctgtttgctcaatcttgtcaacctatggtataagaatgtgcgttctaatacctttgcatcgttaacacggattcactcccaggacggcggtgaccacagtggaaaaggctgctgggcttattgcggccaagtttcgacatagtgcggatggacaggacacttaccaccccctgctttgccacctgattgatgtggctgtggttgcggaggccctctgggaggagtgcttcgctaaacgtgcgcgggagcatctgacggagagtctccaactcgacagcatatccaccaaacagtgggtcgcatttttggccgggatccacgatctcggcaaggccactccagtcttccaggcgaagggcagccgggatcgacgttcgacaccgccatggcttgtgaacactcccctcgaattccggcctttatctttaggagataaggacccatggcacggcacggtgacggccgcctgcctcccagacatccttagtcgccagttggacgtttcccaagagagtgcagaccgcctcgccgtgatcgcaggaggccaccacggggttttcccttcggcaacgtcccgcaggaacgcgcgcattcccaccgctcggggtgagccccggcggggcgagcctaacccctggccgagcattcgggatgagctcgccactaccctcgccagtcttctcggccttgtcggtcttgagagttcgccgcagctgccctccaacgccgcgagcatgctgctggccggattcatctccgtcgcggactggatcggctccatcgatgacagcgcattcttcccatatgcgccggatggccccgacgatctccctgcgtacctggccgaccggaagctgcgggctcacgacgcgatcaggctcttgcactgggatgcctggcctcggcagagcaagctgcctcgtttcgaagaactctttcccaaaatgtcgccaaggcctcttcaggtggccacggagcaggtcgcgcccgaggtcgtggcacccggtctcgtaatccttgaagctcccatgggcgaggggaagactgaggcggccttctatcttgctgactactggaacgcctcgggtttccgaggttcgtacatagccatgccaacccaggcaaccagcaaccagctgcatcagcggttcgagcggttccttcgcggccggtacgggaccgaggaaaagatcaacatgcagcttctgcacggacacgccgctctgaacacggaaatcaagcttttggagaacggccatgccttcccagcgccatccggcattgatcccggcagcggcgagctggaagcgaccgtgggcgcaggggagtggttcacctaccgcaagcgaggcctgcttgctcccttcggtgtcggcaccgtcgatcaagcgctcctgtcggttctccaggtgaagcacgggtttgtgcgactcttcgggctggccggcaagacggtggtcgtggacgaggtccatgcctacgacgcgtacatgacgaccctcttggagcgcctcctggaatggctggcggcgctcggctcgccggtcgtactcctctccgcaacactgccaaccgtaaggaggcaggcgctcgtgaacgcgtatttgagcggtctcggccgcctgcccgtagcggagcttcctaacgaggcatatccgcggatcacctggacaggggtcgtgggcgtgagagtgcgcacggtcgaggctgctgtggagacccgacgacggctcggcctccgatggctgcccttcggtatcgagagtctaccggcacacttgctcggccagctcagggatggaggctgcgccgcggtcatctgcaacaccgtcaatcgcgcccaggaggtccactgcccttcgggacgcctatgccgccctcccggaagaggagcgtccaagccttgacctgttccatgcccgcttcctgttcaaagaccgcaaggaacgtgaggagcgctgcctgaagcgcttcggcaaacccgataaagatgacggacccaccgcagccagaccatggcgggctatcctggtggccacccaggtcatcgagcagagtctggacctggactttgacgtcatggtgagcgagatggcgccggttgacctcctcttgcagcggtcagggcgccttcagcgccaccaccgggcggatcggcgcgccaccagtgaacccgtgctccaggtcctgtcgcccacgctgggggacgacggcacccccgcgttcgagcgcgccaccacctacgtctatgatgagcacatcctcctccgcacctggcacgtcctccaggatcgggaggccatcgccgttcctgaggatatcgagggtttgatcgaggaggtgtaccgcgaatcgggcgaaccgccagacggcgcgccaggacacctcgccgcccgctggcacagcaccttcgccgagatgaagaggaagcggcaacgtgagcgtgacaaagcaatggtgccccgcattccgtcgccttcaacaggcgcaagattggaagactatacgcgcgacccgcgtgaagaggatgctgccgaccttcatcccgctctgcaggcgctgacgcgcctcgccgagccttcagtggaggttgtgttgctgcccgcgaactcccccttggatgcggcagcggacgctgttccctccctggcaacttgcagggaacttctccgtcactccgtctccatcactgccgctgatgttgtacatctattgctcgcacttcccgtgccccacccgtggaagcgctccggactgttacgccgcttgcggctgctctctctcgatgaaaacaacgagtgccgggtgggaaatgggatactgcggtatgacaccagcctcggtttgcaaatcatccgtctctaacgaaggaggtgcccatgtcagagtcgttctcgttcaacctcctcgatgaaccgtggataccgtgcctgaacaatgacgggaagctccgtcgaatcggcgtcagagaggcacttacgcaagcgggcacaatccggcaaatcgcggcaagcaatcccatggatcggctagcgatcctccggttcctgctggcattgctgtattggtgtaaggggaatccgccaacagaagcggagagtgcgcccgatgactcgtttcccacggaatggttcgcgaagctggaccagaacagggattgcttcaacctgctcggggagggaagaaggttttatcagtacaggggaaaacgcgaaatgccgctcacggcaaactatctggtccacgagatacccacgggcaccaatctctggcacttccgacacgccaccgatggagtggatggcctttgtcctgcctgctgcgctttgggcctgttgcggctgccgttgtttgcaacgtccggggggagcggcaagcctccaggcatcaacatgaaacccccactttatgtcatacctgtcggcgactcccttgcaaagacgctgcggctctcttggtgctccgcgccgagtctgggaacgccggcatgggagaagccggacatctcgttgccaaagactggcgaggtgccgttgttaacaggactatcgtggctgcccaggcgggtatggctcggcaatccagaggaatccgaagccacctgcatctcgtgtggtcgcaagaatcggttgataacatccagcgttttcgccggcatcggcagtatgaaaaccgatgatgaaactcccaaccgcctttggcgggacccccatgtcatctatgataacagcggcaagagcaaagtcacgaccctacacgctaggaacgccctgggcgccaccgatgcgggggctggccagtgggcgtcaatcgtagctgggatgttccaacagcaaagcgcccccgctgcaacggacttgcccaatcaggacagttgggccgagggtggcaaatacagcatatgggtcgtcggcttctccaccgtgcagaacgacaagtatctggaggctattgagtacacactgtctctccctgcctcagcaggtcaatctgtgaccgctgtgcaactcttggaacgatggcaagaagagaacgcacgccttgcccgcaaagtctggccgccagatgagcaatggtcttaccgcaagcatcccgagattgcgtcagccatcgccgccgttcgtccccatgtggaaggcaaggtctctgccaaagtgggggagctgcttaccggcggcgatgccgcatggctggaggccgccagcgagtatcgccccatgatggaggcagtcgccaggtctctctacccaggctttacgactgcggctgttgaatggcggaagcacattgctgacacgctgccggatatgaccaccacagggcctacaaaaaaggccgcaagaaagaaaggaggcgcgccatgagcccaacacccacggagcagtacattggcgttctggcaaagctgaagcctggcgacctggggctgctacgcagccatgccgggcaagggctggacaaatcggtgcatgggtttgacctgttcacgggcctttggtggccgctgcggcagagaaaccaagcagcgcctgaacgcgaggtgacctggctgatcgtgaagctttacgctcgctgtccgctcctccagtcgcctggcgataccctcgcccggcaactggcccgttgccagccaagcaaggagccagagcgtcagcgctaccggcagcgctttgaccggatgctcatgctgcccatcatcaagatggagcctgtgctgcaaggggcagtcgccatgatcgcctcaaaggatctcaagcttgattgggtgaaactcacggatgacctgtccatctgggaacgggaacgtacccggctcaggtgggcggaacaatttctggaaagcaacgaaaggacatagccatgctcattgaaatccacatcatccagaaccacagcccaaacaacctcaatcgggacgacctcggcgcgcccaagacctgctacttcggcggcgtcctgcgctcacgcatctccagccaggccatcaaacgcagcatccgcatgagcgatgagttcagcaagctacttggcggcgttcgcacgcgacagttggcgaagctgatcgcagagaacgtaactggcaaggcggatgtccagaatcgcgctgcacgaattctccaagcatgtggcatcgcaccgaaagatgagtcaagaagcgatatgctcgtttacacgactagggaggcggttgcccaaatggctgcgctgctacagaacgacgaaggcaagaccgatgcacagctacaaagtgatttcgggatgctcattagggaacgggtggctgtgccggacatggccctcagtggaagaatgctggaaaccggtgtcctgaaagacacaactgtagaagcggccctccaggtagcccacgccatttccacccatgaagcccgcccggaggtggactactacgtggcgaaggacgatgtcccaggagaggatgccggggcaggatatgtagacgaagcgatgttcgcttccgcctgcttctacaagtacttctctatccactgggaacaattggtcaagaacttgaaagcctatggggacaatcacaaagagcttgccgcccataccgtcggcgcgttcattcgcggggcggcgctggtcaatccctctggcaagcagaacagccatgcctcgcataataagcctgacggcatactgatcgagataagggacttccccattagctacgccaacgccttcgccaatccggtgtcgcacggcgagcgcgacgttatctcgcaaagcatcgcccagttgggccagtacgcccatgacctggataccggctacggcagaccgcagaagcgcttctggttctccccgaatggccgctacccgttaacggtgcgggacgataaggaggataaggacgtcgccgacaagaacctgacgtcattggaggacctggtacgcgctgtcaccgcagagatcggctacgactgggacgcggtccagagcattgccttgaatgggagatgagccgtatgagcgccaacaccctgtttctccggctggaaggccccatgcaagcctggggagaccaggaatccaagttcgtggtgcgacgaacagccgaggcccccaccaaatcgggagtgatcggtatgctgtgcgccgcgctgggcgtctcgcgccccgatgcctcctatgagtggcttccgaggttgagcgccctgcgcatgggagtccggaccgaccggccgggcgtccgctggtgggactaccacaccgtcggcgcggggatgcagatgcgcatcgccgaaggcaagaccaaagccggcgcgatgctgacgcggcgggagtacctctgcgacgccagctttctggtcgctctgcagggtgagccgacactggtcgcccgcctcgaggcggcgctgcgaaaaccccactggacaccctacttggggagaaaggcctgcccgccatcccgcccgctgttggagcgtcccgccgaggagtctggcgacctgctgactgcactttgctccgtcccgtggcgaaagcggctcgcaacagaccgtgtgccggcaaccgtggagtgtctgctcgactggcagtcgtcgctggaggagccagtagcacccgccgacgccctcgtctggtacgatgtgccgctcacttttgagcctcctgcacacgcccctagattcgtcatgcgccgccggttgcgcgtcggtatcggaggcgaggtcagcatagccgacaagcctgcccagaatcggacgctatcgcctccgcgaccccgcgcggactaccggaataccgagtatcgcaatgcccgcgctaagcgcctgaacgacgactatggcctctgcgtgttctgcaaaagtcccgccaccaccgtgcagcacatcacctaccgtcgggcgggaggcgacgaaacccaggacgacctccgctcactctgccggctttgtcatgacgcggtgacgatgatcgaatacggctatggcatgggcatggatcgcatcaaccctgaggagctacgctggcgggaagacattatccagaagcgtcaagagatcatccaattccgctcgctggagacccgacgacgtcgcctcagccctgaggaggtgtagtagccatgtacctatcgtgcctcttgatcaacgtcggagataacccggaccgcccgcgccccggtcggctgtggctccgcaacctctatcgagttcaccagcgcctgtgcatggcgtttccgactgcatccagggtgtccgctgatccggacttccttcagcctttcaacccggacgatttcgggccaaagccagtacatgccgctcggagcatggatgctggcttcctgttccgcattgaccctcaacccagtggccgagttgtgattcttgtgcagtctgcaagcatgcccgactgggactacgctttccataatgcggactatctcctggcggctccccccagcacgaaagcatttgaaccgtccgccacaaaggagcagcgtctccaattccgtcttgtggcgaatcccacaaagcgattgagccagaactcacgggaaaaggacggccaacccgtcaaatcggaatggattgggaaacgagtccccgttccaaccgaaaagctagaggagtggctagcgcagcgagctgcacctgccggattccgcgtagagaagctccttagcgtacaacctggttacgtccacgcctccaaggatggcggcggtgggggaaaccgacttcgctccgtccggtatgacggtatcctccaagtcaccgatcccgcacctttccaagataccctcatacgcggcattggtcccgcgaaggcttttggctgtggtctcctgtcagtcgccccgccagggaggtgaaccatgaaagacttgcacgcgttacccaagatacgggatagctggagctacttgtacgtggagcattgccgcatcgatcaggaggacaaggccattgccctgcacgatgcccagggcgtcaccgccgtcccctgcgcgagtctgtcgttactgatgctcgggccgggcaccagaatcacccatgccgccatccatgtcctggcggagaacggctgcatggtcttatggacgggggaagagggcgtgcgctgttatgccgtcggactgggcgaaacccggtcggcccggcgcctgctccatcaggcctacctctgtacccacccttccctgcggcttcaggtggcgcggcgactttatgagatgcggtttcccgatcccctggaccctggcctcagcttgcagcaaatacggggtaaagagggcatccgtgtccgggaggcatatgcccaggccagccgcgccaccgggatcccctggtccggacgggcctaccgacggggggactggagtgtcgccgaccctatgaaccgggcgctctccgcagccaatagctgtctctacggaatttgtcatgccgccatcgtctctgccgggtactccccagccctgggtttcgtccatacgggcaagatgctctccttcgtttacgacatcgccgatctctacaaggtcgacttcagcatcccgattgcctttggggctgccgaagaagggtttcatcaactggagacgcgggtgcggcaggcaagcagggatgccttccacaaacagcggctcttggcccgtataatccccgatattgatcgcgccctcggcgtgaagcctaccgagcaggatgaggacagcgcctacgacgcagacgacgccctccccggcggcctgtgggacccggaagtgggatcggtaccggggggaacaagtcatgcgagcctagcgaggtgaaatgatgctggtgctaagacttgagcgggttcctgcatcgttgcggggtgaactgacacggtggctgctggaggcctccaccgggatgtttgtgggcagggtgtctgccatggtgcgcgaacagctatggacgctggtgtgccgcagcctgaagggaggtggagcggtacttgcctatagcacggacaatgagcaggggttcgcgctgcggacatggggcactccgtcgcgggaggtggtagacttcgaggggctttcgctggtgcgggtgccgcgttctgtgcctgaggagtagtgtttttctatgtattttccagtgttgtccccacacgcgtgggggtgaaccgtcatcgtgactgttg

SEQ ID NO: 1061 - DNA, 106334 bp, Artificial Sequence
  Synthetic Oligonucleotide
  misc_feature (1)..(96472): n is a, c, g, or t
nnnnnnnnnnnnnnnnnnnnnnnnnnnnnnnnnnnnnnnnnnnnnnnnnnnnnnnnnnnnnnnnnnnnnnnnnnnnnnnnnnnnnnnnnnnnnnnnnnnnnnnnnnnnnnnnnnnnnnnnnnnnnnnnnnnnnnnnnnnnnnnnnnnnnnnnnnnnnnnnnnnnnnnnnnnnnnnnnnnnnnnnnnnnnnnnnnnnnnnnnnnnnnnnnnnnnnnnnnnnnnnnnnnnnnnnnnnnnnnnnnnnnnnnnnnnnnnnnnnnnnnnnnnnnnnnnnnnnnnnnnnnnnnnnnnnnnnnnnnnnnnnnnnnnnnnnnnnnnnnnnnnnnnnnnnnnnnnnnnnnnnnnnnnnnnnnnnnnnnnnnnnnnnnnnnnnnnnnnnnnnnnnnnnnnnnnnnnnnnnnnnnnnnnnnnnnnnnnnnnnnnnnnnnnnnnnnnnnnnnnnnnnnnnnnnnnnnnnnnnnnnnnnnnnnnnnnnnnnnnnnnnnnnnnnnnnnnnnnnnnnnnnnnnnnnnnnnnnnnnnnnnnnnnnnnnnnnnnnnnnnnnnnnnnnnnnnnnnnnnnnnnnnnnnnnnnnnnnnnnnnnnnnnnnnnnnnnnnnnnnnnnnnnnnnnnnnnnnnnnnnnnnnnnnnnnnnnnnnnnnnnnnnnnnnnnnnnnnnnnnnnnnnnnnnnnnnnnnnnnnnnnnnnnnnnnnnnnnnnnnnnnnnnnnnnnnnnnnnnnnnnnnnnnnnnnnnnnnnnnnnnnnnnnnnnnnnnnnnnnnnnnnnnnnnnnnnnnnnnnnnnnnnnnnnnnnnnnnnnnnnnnnnnnnnnnnnnnnnnnnnnnnnnnnnnnnnnnnnnnnnnnnnnnnnnnnnnnnnnnnnnnnnnnnnnnnnnnnnnnnnnnnnnnnnnnnnnnnnnnnnnnnnnnnnnnnnnnnnnnnnnnnnnnnnnnnnnnnnnnnnnnnnnnnnnnnnnnnnnnnnnnnnnnnnnnnnnnnnnnnnnnnnnnnnnnnnnnnnnnnnnnnnnnnnnnnnnnnnnnnnnnnnnnnnnnnnnnnnnnnnnnnnnnnnnnnnnnnnnnnnnnnnnnnnnnnnnnnnnnnnnnnnnnnnnnnnnnnnnnnnnnnnnnnnnnnnnnnnnnnnnnnnnnnnnnnnnnnnnnnnnnnnnnnnnnnnnnnnnnnnnnnnnnnnnnnnnnnnnnnnnnnnnnnnnnnnnnnnnnnnnnnnnnnnnnnnnnnnnnnnnnnnnnnnnnnnnnnnnnnnnnnnnnnnnnnnnnnnnnnnnnnnnnnnnnnnnnnnnnnnnnnnnnnnnnnnnnnnnnnnnnnnnnnnnnnnnnnnnnnnnnnnnnnnnnnnnnnnnnnnnnnnnnnnnnnnnnnnnnnnnnnnnnnnnnnnnnnnnnnnnnnnnnnnnnnnnnnnnnnnnnnnnnnnnnnnnnnnnnnnnnnnnnnnnnnnnnnnnnnnnnnnnnnnnnnnnnnnnnnnnnnnnnnnnnnnnnnnnnnnnnnnnnnnnnnnnnnnnnnnnnnnnnnnnnnnnnnnnnnnnnnnnnnnnnnnnnnnnnnnnnnnnnnnnnnnnnnnnnnnnnnnnnnnnnnnnnnnnnnnnnnnnnnnnnnnnnnnnnnnnnnnnnnnnnnnnnnnnnnnnnnnnnnnnnnnnnnnnnnnnnnnnnnnnnnnnnnnnnnnnnnnnnnnnnnnnnnnnnnnnnnnnnnnnnnnnnnnnnnnnnnnnnnnnnnnnnnnnnnnnnnnnnnnnnnnnnnnnnnnnnnnnnnnnnnnnnnnnnnnnnnnnnnnnnnnnnnnnnnnnnnnnnnnnnnnnnnnnnnnnnnnnnnnnnnnnnnnnnnnnnnnnnnnnnnnnnnnnnnnnnnnnnnnnnnnnnnnnnnnnnnnnnnnnnnnnnnnnnnnnnnnnnnnnnnnnnnnnnnnnnnnnnnnnnnnnnnnnnnnnnnnnnnnnnnnnnnnnnnnnnnnnnnnnnnnnnnnnnnnnnnnnnnnnnnnnnnnnnnnnnnnnnnnnnnnnnnnnnnnnnnnnnnnnnnnnnnnnnnnnnnnnnnnnnnnnnnnnnnnnnnnnnnnnnnnnnnnnnnnnnnnnnnnnnnnnnnnnnnnnnnnnnnnnnnnnnnnnnnnnnnnnnnnnnnnnnnnnnnnnnnnnnnnnnnnnnnnnnnnnnnnnnnnnnnnnnnnnnnnnnnnnnnnnnnnnnnnnnnnnnnnnnnnnnnnnnnnnnnnnnnnnnnnnnnnnnnnnnnnnnnnnnnnnnnnnnnnnnnnnnnnnnnnnnnnnnnnnnnnnnnnnnnnnnnnnnnnnnnnnnnnnnnnnnnnnnnnnnnnnnnnnnnnnnnnnnnnnnnnnnnnnnnnnnnnnnnnnnnnnnnnnnnnnnnnnnnnnnnnnnnnnnnnnnnnnnnnnnnnnnnnnnnnnnnnnnnnnnnnnnnnnnnnnnnnnnnnnnnnnnnnnnnnnnnnnnnnnnnnnnnnnnnnnnnnnnnnnnnnnnnnnnnnnnnnnnnnnnnnnnnnnnnnnnnnnnnnnnnnnnnnnnnnnnnnnnnnnnnnnnnnnnnnnnnnnnnnnnnnnnnnnnnnnnnnnnnnnnnnnnnnnnnnnnnnnnnnnnnnnnnnnnnnnnnnnnnnnnnnnnnnnnnnnnnnnnnnnnnnnnnnnnnnnnnnnnnnnnnnnnnnnnnnnnnnnnnnnnnnnnnnnnnnnnnnnnnnnnnnnnnnnnnnnnnnnnnnnnnnnnnnnnnnnnnnnnnnnnnnnnnnnnnnnnnnnnnnnnnnnnnnnnnnnnnnnnnnnnnnnnnnnnnnnnnnnnnnnnnnnnnnnnnnnnnnnnnnnnnnnnnnnnnnnnnnnnnnnnnnnnnnnnnnnnnnnnnnnnnnnnnnnnnnnnnnnnnnnnnnnnnnnnnnnnnnnnnnnnnnnnnnnnnnnnnnnnnnnnnnnnnnnnnnnnnnnnnnnnnnnnnnnnnnnnnnnnnnnnnnnnnnnnnnnnnnnnnnnnnnnnnnnnnnnnnnnnnnnnnnnnnnnnnnnnnnnnnnnnnnnnnnnnnnnnnnnnnnnnnnnnnnnnnnnnnnnnnnnnnnnnnnnnnnnnnnnnnnnnnnnnnnnnnnnnnnnnnnnnnnnnnnnnnnnnnnnnnnnnnnnnnnnnnnnnnnnnnnnnnnnnnnnnnnnnnnnnnnnnnnnnnnnnnnnnnnnnnnnnnnnnnnnnnnnnnnnnnnnnnnnnnnnnnnnnnnnnnnnnnnnnnnnnnnnnnnnnnnnnnnnnnnnnnnnnnnnnnnnnnnnnnnnnnnnnnnnnnnnnnnnnnnnnnnnnnnnnnnnnnnnnnnnnnnnnnnnnnnnnnnnnnnnnnnnnnnnnnnnnnnnnnnnnnnnnnnnnnnnnnnnnnnnnnnnnnnnnnnnnnnnnnnnnnnnnnnnnnnnnnnnnnnnnnnnnnnnnnnnnnnnnnnnnnnnnnnnnnnnnnnnnnnnnnnnnnnnnnnnnnnnnnnnnnnnnnnnnnnnnnnnnnnnnnnnnnnnnnnnnnnnnnnnnnnnnnnnnnnnnnnnnnnnnnnnnnnnnnnnnnnnnnnnnnnnnnnnnnnnnnnnnnnnnnnnnnnnnnnnnnnnnnnnnnnnnnnnnnnnnnnnnnnnnnnnnnnnnnnnnnnnnnnnnnnnnnnnnnnnnnnnnnnnnnnnnnnnnnnnnnnnnnnnnnnnnnnnnnnnnnnnnnnnnnnnnnnnnnnnnnnnnnnnnnnnnnnnnnnnnnnnnnnnnnnnnnnnnnnnnnnnnnnnnnnnnnnnnnnnnnnnnnnnnnnnnnnnnnnnnnnnnnnnnnnnnnnnnnnnnnnnnnnnnnnnnnnnnnnnnnnnnnnnnnnnnnnnnnnnnnnnnnnnnnnnnnnnnnnnnnnnnnnnnnnnnnnnnnnnnnnnnnnnnnnnnnnnnnnnnnnnnnnnnnnnnnnnnnnnnnnnnnnnnnnnnnnnnnnnnnnnnnnnnnnnnnnnnnnnnnnnnnnnnnnnnnnnnnnnnnnnnnnnnnnnnnnnnnnnnnnnnnnnnnnnnnnnnnnnnnnnnnnnnnnnnnnnnnnnnnnnnnnnnnnnnnnnnnnnnnnnnnnnnnnnnnnnnnnnnnnnnnnnnnnnnnnnnnnnnnnnnnnnnnnnnnnnnnnnnnnnnnnnnnnnnnnnnnnnnnnnnnnnnnnnnnnnnnnnnnnnnnnnnnnnnnnnnnnnnnnnnnnnnnnnnnnnnnnnnnnnnnnnnnnnnnnnnnnnnnnnnnnnnnnnnnnnnnnnnnnnnnnnnnnnnnnnnnnnnnnnnnnnnnnnnnnnnnnnnnnnnnnnnnnnnnnnnnnnnnnnnnnnnnnnnnnnnnnnnnnnnnnnnnnnnnnnnnnnnnnnnnnnnnnnnnnnnnnnnnnnnnnnnnnnnnnnnnnnnnnnnnnnnnnnnnnnnnnnnnnnnnnnnnnnnnnnnnnnnnnnnnnnnnnnnnnnnnnnnnnnnnnnnnnnnnnnnnnnnnnnnnnnnnnnnnnnnnnnnnnnnnnnnnnnnnnnnnnnnnnnnnnnnnnnnnnnnnnnnnnnnnnnnnnnnnnnnnnnnnnnnnnnnnnnnnnnnnnnnnnnnnnnnnnnnnnnnnnnnnnnnnnnnnnnnnnnnnnnnnnnnnnnnnnnnnnnnnnnnnnnnnnnnnnnnnnnnnnnnnnnnnnnnnnnnnnnnnnnnnnnnnnnnnnnnnnnnnnnnnnnnnnnnnnnnnnnnnnnnnnnnnnnnnnnnnnnnnnnnnnnnnnnnnnnnnnnnnnnnnnnnnnnnnnnnnnnnnnnnnnnnnnnnnnnnnnnnnnnnnnnnnnnnnnnnnnnnnnnnnnnnnnnnnnnnnnnnnnnnnnnnnnnnnnnnnnnnnnnnnnnnnnnnnnnnnnnnnnnnnnnnnnnnnnnnnnnnnnnnnnnnnnnnnnnnnnnnnnnnnnnnnnnnnnnnnnnnnnnnnnnnnnnnnnnnnnnnnnnnnnnnnnnnnnnnnnnnnnnnnnnnnnnnnnnnnnnnnnnnnnnnnnnnnnnnnnnnnnnnnnnnnnnnnnnnnnnnnnnnnnnnnnnnnnnnnnnnnnnnnnnnnnnnnnnnnnnnnnnnnnnnnnnnnnnnnnnnnnnnnnnnnnnnnnnnnnnnnnnnnnnnnnnnnnnnnnnnnnnnnnnnnnnnnnnnnnnnnnnnnnnnnnnnnnnnnnnnnnnnnnnnnnnnnnnnnnnnnnnnnnnnnnnnnnnnnnnnnnnnnnnnnnnnnnnnnnnnnnnnnnnnnnnnnnnnnnnnnnnnnnnnnnnnnnnnnnnnnnnnnnnnnnnnnnnnnnnnnnnnnnnnnnnnnnnnnnnnnnnnnnnnnnnnnnnnnnnnnnnnnnnnnnnnnnnnnnnnnnnnnnnnnnnnnnnnnnnnnnnnnnnnnnnnnnnnnnnnnnnnnnnnnnnnnnnnnnnnnnnnnnnnnnnnnnnnnnnnnnnnnnnnnnnnnnnnnnnnnnnnnnnnnnnnnnnnnnnnnnnnnnnnnnnnnnnnnnnnnnnnnnnnnnnnnnnnnnnnnnnnnnnnnnnnnnnnnnnnnnnnnnnnnnnnnnnnnnnnnnnnnnnnnnnnnnnnnnnnnnnnnnnnnnnnnnnnnnnnnnnnnnnnnnnnnnnnnnnnnnnnnnnnnnnnnnnnnnnnnnnnnnnnnnnnnnnnnnnnnnnnnnnnnnnnnnnnnnnnnnnnnnnnnnnnnnnnnnnnnnnnnnnnnnnnnnnnnnnnnnnnnnnnnnnnnnnnnnnnnnnnnnnnnnnnnnnnnnnnnnnnnnnnnnnnnnnnnnnnnnnnnnnnnnnnnnnnnnnnnnnnnnnnnnnnnnnnnnnnnnnnnnnnnnnnnnnnnnnnnnnnnnnnnnnnnnnnnnnnnnnnnnnnnnnnnnnnnnnnnnnnnnnnnnnnnnnnnnnnnnnnnnnnnnnnnnnnnnnnnnnnnnnnnnnnnnnnnnnnnnnnnnnnnnnnnnnnnnnnnnnnnnnnnnnnnnnnnnnnnnnnnnnnnnnnnnnnnnnnnnnnnnnnnnnnnnnnnnnnnnnnnnnnnnnnnnnnnnnnnnnnnnnnnnnnnnnnnnnnnnnnnnnnnnnnnnnnnnnnnnnnnnnnnnnnnnnnnnnnnnnnnnnnnnnnnnnnnnnnnnnnnnnnnnnnnnnnnnnnnnnnnnnnnnnnnnnnnnnnnnnnnnnnnnnnnnnnnnnnnnnnnnnnnnnnnnnnnnnnnnnnnnnnnnnnnnnnnnnnnnnnnnnnnnnnnnnnnnnnnnnnnnnnnnnnnnnnnnnnnnnnnnnnnnnnnnnnnnnnnnnnnnnnnnnnnnnnnnnnnnnnnnnnnnnnnnnnnnnnnnnnnnnnnnnnnnnnnnnnnnnnnnnnnnnnnnnnnnnnnnnnnnnnnnnnnnnnnnnnnnnnnnnnnnnnnnnnnnnnnnnnnnnnnnnnnnnnnnnnnnnnnnnnnnnnnnnnnnnnnnnnnnnnnnnnnnnnnnnnnnnnnnnnnnnnnnnnnnnnnnnnnnnnnnnnnnnnnnnnnnnnnnnnnnnnnnnnnnnnnnnnnnnnnnnnnnnnnnnnnnnnnnnnnnnnnnnnnnnnnnnnnnnnnnnnnnnnnnnnnnnnnnnnnnnnnnnnnnnnnnnnnnnnnnnnnnnnnnnnnnnnnnnnnnnnnnnnnnnnnnnnnnnnnnnnnnnnnnnnnnnnnnnnnnnnnnnnnnnnnnnnnnnnnnnnnnnnnnnnnnnnnnnnnnnnnnnnnnnnnnnnnnnnnnnnnnnnnnnnnnnnnnnnnnnnnnnnnnnnnnnnnnnnnnnnnnnnnnnnnnnnnnnnnnnnnnnnnnnnnnnnnnnnnnnnnnnnnnnnnnnnnnnnnnnnnnnnnnnnnnnnnnnnnnnnnnnnnnnnnnnnnnnnnnnnnnnnnnnnnnnnnnnnnnnnnnnnnnnnnnnnnnnnnnnnnnnnnnnnnnnnnnnnnnnnnnnnnnnnnnnnnnnnnnnnnnnnnnnnnnnnnnnnnnnnnnnnnnnnnnnnnnnnnnnnnnnnnnnnnnnnnnnnnnnnnnnnnnnnnnnnnnnnnnnnnnnnnnnnnnnnnnnnnnnnnnnnnnnnnnnnnnnnnnnnnnnnnnnnnnnnnnnnnnnnnnnnnnnnnnnnnnnnnnnnnnnnnnnnnnnnnnnnnnnnnnnnnnnnnnnnnnnnnnnnnnnnnnnnnnnnnnnnnnnnnnnnnnnnnnnnnnnnnnnnnnnnnnnnnnnnnnnnnnnnnnnnnnnnnnnnnnnnnnnnnnnnnnnnnnnnnnnnnnnnnnnnnnnnnnnnnnnnnnnnnnnnnnnnnnnnnnnnnnnnnnnnnnnnnnnnnnnnnnnnnnnnnnnnnnnnnnnnnnnnnnnnnnnnnnnnnnnnnnnnnnnnnnnnnnnnnnnnnnnnnnnnnnnnnnnnnnnnnnnnnnnnnnnnnnnnnnnnnnnnnnnnnnnnnnnnnnnnnnnnnnnnnnnnnnnnnnnnnnnnnnnnnnnnnnnnnnnnnnnnnnnnnnnnnnnnnnnnnnnnnnnnnnnnnnnnnnnnnnnnnnnnnnnnnnnnnnnnnnnnnnnnnnnnnnnnnnnnnnnnnnnnnnnnnnnnnnnnnnnnnnnnnnnnnnnnnnnnnnnnnnnnnnnnnnnnnnnnnnnnnnnnnnnnnnnnnnnnnnnnnnnnnnnnnnnnnnnnnnnnnnnnnnnnnnnnnnnnnnnnnnnnnnnnnnnnnnnnnnnnnnnnnnnnnnnnnnnnnnnnnnnnnnnnnnnnnnnnnnnnnnnnnnnnnnnnnnnnnnnnnnnnnnnnnnnnnnnnnnnnnnnnnnnnnnnnnnnnnnnnnnnnnnnnnnnnnnnnnnnnnnnnnnnnnnnnnnnnnnnnnnnnnnnnnnnnnnnnnnnnnnnnnnnnnnnnnnnnnnnnnnnnnnnnnnnnnnnnnnnnnnnnnnnnnnnnnnnnnnnnnnnnnnnnnnnnnnnnnnnnnnnnnnnnnnnnnnnnnnnnnnnnnnnnnnnnnnnnnnnnnnnnnnnnnnnnnnnnnnnnnnnnnnnnnnnnnnnnnnnnnnnnnnnnnnnnnnnnnnnnnnnnnnnnnnnnnnnnnnnnnnnnnnnnnnnnnnnnnnnnnnnnnnnnnnnnnnnnnnnnnnnnnnnnnnnnnnnnnnnnnnnnnnnnnnnnnnnnnnnnnnnnnnnnnnnnnnnnnnnnnnnnnnnnnnnnnnnnnnnnnnnnnnnnnnnnnnnnnnnnnnnnnnnnnnnnnnnnnnnnnnnnnnnnnnnnnnnnnnnnnnnnnnnnnnnnnnnnnnnnnnnnnnnnnnnnnnnnnnnnnnnnnnnnnnnnnnnnnnnnnnnnnnnnnnnnnnnnnnnnnnnnnnnnnnnnnnnnnnnnnnnnnnnnnnnnnnnnnnnnnnnnnnnnnnnnnnnnnnnnnnnnnnnnnnnnnnnnnnnnnnnnnnnnnnnnnnnnnnnnnnnnnnnnnnnnnnnnnnnnnnnnnnnnnnnnnnnnnnnnnnnnnnnnnnnnnnnnnnnnnnnnnnnnnnnnnnnnnnnnnnnnnnnnnnnnnnnnnnnnnnnnnnnnnnnnnnnnnnnnnnnnnnnnnnnnnnnnnnnnnnnnnnnnnnnnnnnnnnnnnnnnnnnnnnnnnnnnnnnnnnnnnnnnnnnnnnnnnnnnnnnnnnnnnnnnnnnnnnnnnnnnnnnnnnnnnnnnnnnnnnnnnnnnnnnnnnnnnnnnnnnnnnnnnnnnnnnnnnnnnnnnnnnnnnnnnnnnnnnnnnnnnnnnnnnnnnnnnnnnnnnnnnnnnnnnnnnnnnnnnnnnnnnnnnnnnnnnnnnnnnnnnnnnnnnnnnnnnnnnnnnnnnnnnnnnnnnnnnnnnnnnnnnnnnnnnnnnnnnnnnnnnnnnnnnnnnnnnnnnnnnnnnnnnnnnnnnnnnnnnnnnnnnnnnnnnnnnnnnnnnnnnnnnnnnnnnnnnnnnnnnnnnnnnnnnnnnnnnnnnnnnnnnnnnnnnnnnnnnnnnnnnnnnnnnnnnnnnnnnnnnnnnnnnnnnnnnnnnnnnnnnnnnnnnnnnnnnnnnnnnnnnnnnnnnnnnnnnnnnnnnnnnnnnnnnnnnnnnnnnnnnnnnnnnnnnnnnnnnnnnnnnnnnnnnnnnnnnnnnnnnnnnnnnnnnnnnnnnnnnnnnnnnnnnnnnnnnnnnnnnnnnnnnnnnnnnnnnnnnnnnnnnnnnnnnnnnnnnnnnnnnnnnnnnnnnnnnnnnnnnnnnnnnnnnnnnnnnnnnnnnnnnnnnnnnnnnnnnnnnnnnnnnnnnnnnnnnnnnnnnnnnnnnnnnnnnnnnnnnnnnnnnnnnnnnnnnnnnnnnnnnnnnnnnnnnnnnnnnnnnnnnnnnnnnnnnnnnnnnnnnnnnnnnnnnnnnnnnnnnnnnnnnnnnnnnnnnnnnnnnnnnnnnnnnnnnnnnnnnnnnnnnnnnnnnnnnnnnnnnnnnnnnnnnnnnnnnnnnnnnnnnnnnnnnnnnnnnnnnnnnnnnnnnnnnnnnnnnnnnnnnnnnnnnnnnnnnnnnnnnnnnnnnnnnnnnnnnnnnnnnnnnnnnnnnnnnnnnnnnnnnnnnnnnnnnnnnnnnnnnnnnnnnnnnnnnnnnnnnnnnnnnnnnnnnnnnnnnnnnnnnnnnnnnnnnnnnnnnnnnnnnnnnnnnnnnnnnnnnnnnnnnnnnnnnnnnnnnnnnnnnnnnnnnnnnnnnnnnnnnnnnnnnnnnnnnnnnnnnnnnnnnnnnnnnnnnnnnnnnnnnnnnnnnnnnnnnnnnnnnnnnnnnnnnnnnnnnnnnnnnnnnnnnnnnnnnnnnnnnnnnnnnnnnnnnnnnnnnnnnnnnnnnnnnnnnnnnnnnnnnnnnnnnnnnnnnnnnnnnnnnnnnnnnnnnnnnnnnnnnnnnnnnnnnnnnnnnnnnnnnnnnnnnnnnnnnnnnnnnnnnnnnnnnnnnnnnnnnnnnnnnnnnnnnnnnnnnnnnnnnnnnnnnnnnnnnnnnnnnnnnnnnnnnnnnnnnnnnnnnnnnnnnnnnnnnnnnnnnnnnnnnnnnnnnnnnnnnnnnnnnnnnnnnnnnnnnnnnnnnnnnnnnnnnnnnnnnnnnnnnnnnnnnnnnnnnnnnnnnnnnnnnnnnnnnnnnnnnnnnnnnnnnnnnnnnnnnnnnnnnnnnnnnnnnnnnnnnnnnnnnnnnnnnnnnnnnnnnnnnnnnnnnnnnnnnnnnnnnnnnnnnnnnnnnnnnnnnnnnnnnnnnnnnnnnnnnnnnnnnnnnnnnnnnnnnnnnnnnnnnnnnnnnnnnnnnnnnnnnnnnnnnnnnnnnnnnnnnnnnnnnnnnnnnnnnnnnnnnnnnnnnnnnnnnnnnnnnnnnnnnnnnnnnnnnnnnnnnnnnnnnnnnnnnnnnnnnnnnnnnnnnnnnnnnnnnnnnnnnnnnnnnnnnnnnnnnnnnnnnnnnnnnnnnnnnnnnnnnnnnnnnnnnnnnnnnnnnnnnnnnnnnnnnnnnnnnnnnnnnnnnnnnnnnnnnnnnnnnnnnnnnnnnnnnnnnnnnnnnnnnnnnnnnnnnnnnnnnnnnnnnnnnnnnnnnnnnnnnnnnnnnnnnnnnnnnnnnnnnnnnnnnnnnnnnnnnnnnnnnnnnnnnnnnnnnnnnnnnnnnnnnnnnnnnnnnnnnnnnnnnnnnnnnnnnnnnnnnnnnnnnnnnnnnnnnnnnnnnnnnnnnnnnnnnnnnnnnnnnnnnnnnnnnnnnnnnnnnnnnnnnnnnnnnnnnnnnnnnnnnnnnnnnnnnnnnnnnnnnnnnnnnnnnnnnnnnnnnnnnnnnnnnnnnnnnnnnnnnnnnnnnnnnnnnnnnnnnnnnnnnnnnnnnnnnnnnnnnnnnnnnnnnnnnnnnnnnnnnnnnnnnnnnnnnnnnnnnnnnnnnnnnnnnnnnnnnnnnnnnnnnnnnnnnnnnnnnnnnnnnnnnnnnnnnnnnnnnnnnnnnnnnnnnnnnnnnnnnnnnnnnnnnnnnnnnnnnnnnnnnnnnnnnnnnnnnnnnnnnnnnnnnnnnnnnnnnnnnnnnnnnnnnnnnnnnnnnnnnnnnnnnnnnnnnnnnnnnnnnnnnnnnnnnnnnnnnnnnnnnnnnnnnnnnnnnnnnnnnnnnnnnnnnnnnnnnnnnnnnnnnnnnnnnnnnnnnnnnnnnnnnnnnnnnnnnnnnnnnnnnnnnnnnnnnnnnnnnnnnnnnnnnnnnnnnnnnnnnnnnnnnnnnnnnnnnnnnnnnnnnnnnnnnnnnnnnnnnnnnnnnnnnnnnnnnnnnnnnnnnnnnnnnnnnnnnnnnnnnnnnnnnnnnnnnnnnnnnnnnnnnnnnnnnnnnnnnnnnnnnnnnnnnnnnnnnnnnnnnnnnnnnnnnnnnnnnnnnnnnnnnnnnnnnnnnnnnnnnnnnnnnnnnnnnnnnnnnnnnnnnnnnnnnnnnnnnnnnnnnnnnnnnnnnnnnnnnnnnnnnnnnnnnnnnnnnnnnnnnnnnnnnnnnnnnnnnnnnnnnnnnnnnnnnnnnnnnnnnnnnnnnnnnnnnnnnnnnnnnnnnnnnnnnnnnnnnnnnnnnnnnnnnnnnnnnnnnnnnnnnnnnnnnnnnnnnnnnnnnnnnnnnnnnnnnnnnnnnnnnnnnnnnnnnnnnnnnnnnnnnnnnnnnnnnnnnnnnnnnnnnnnnnnnnnnnnnnnnnnnnnnnnnnnnnnnnnnnnnnnnnnnnnnnnnnnnnnnnnnnnnnnnnnnnnnnnnnnnnnnnnnnnnnnnnnnnnnnnnnnnnnnnnnnnnnnnnnnnnnnnnnnnnnnnnnnnnnnnnnnnnnnnnnnnnnnnnnnnnnnnnnnnnnnnnnnnnnnnnnnnnnnnnnnnnnnnnnnnnnnnnnnnnnnnnnnnnnnnnnnnnnnnnnnnnnnnnnnnnnnnnnnnnnnnnnnnnnnnnnnnnnnnnnnnnnnnnnnnnnnnnnnnnnnnnnnnnnnnnnnnnnnnnnnnnnnnnnnnnnnnnnnnnnnnnnnnnnnnnnnnnnnnnnnnnnnnnnnnnnnnnnnnnnnnnnnnnnnnnnnnnnnnnnnnnnnnnnnnnnnnnnnnnnnnnnnnnnnnnnnnnnnnnnnnnnnnnnnnnnnnnnnnnnnnnnnnnnnnnnnnnnnnnnnnnnnnnnnnnnnnnnnnnnnnnnnnnnnnnnnnnnnnnnnnnnnnnnnnnnnnnnnnnnnnnnnnnnnnnnnnnnnnnnnnnnnnnnnnnnnnnnnnnnnnnnnnnnnnnnnnnnnnnnnnnnnnnnnnnnnnnnnnnnnnnnnnnnnnnnnnnnnnnnnnnnnnnnnnnnnnnnnnnnnnnnnnnnnnnnnnnnnnnnnnnnnnnnnnnnnnnnnnnnnnnnnnnnnnnnnnnnnnnnnnnnnnnnnnnnnnnnnnnnnnnnnnnnnnnnnnnnnnnnnnnnnnnnnnnnnnnnnnnnnnnnnnnnnnnnnnnnnnnnnnnnnnnnnnnnnnnnnnnnnnnnnnnnnnnnnnnnnnnnnnnnnnnnnnnnnnnnnnnnnnnnnnnnnnnnnnnnnnnnnnnnnnnnnnnnnnnnnnnnnnnnnnnnnnnnnnnnnnnnnnnnnnnnnnnnnnnnnnnnnnnnnnnnnnnnnnnnnnnnnnnnnnnnnnnnnnnnnnnnnnnnnnnnnnnnnnnnnnnnnnnnnnnnnnnnnnnnnnnnnnnnnnnnnnnnnnnnnnnnnnnnnnnnnnnnnnnnnnnnnnnnnnnnnnnnnnnnnnnnnnnnnnnnnnnnnnnnnnnnnnnnnnnnnnnnnnnnnnnnnnnnnnnnnnnnnnnnnnnnnnnnnnnnnnnnnnnnnnnnnnnnnnnnnnnnnnnnnnnnnnnnnnnnnnnnnnnnnnnnnnnnnnnnnnnnnnnnnnnnnnnnnnnnnnnnnnnnnnnnnnnnnnnnnnnnnnnnnnnnnnnnnnnnnnnnnnnnnnnnnnnnnnnnnnnnnnnnnnnnnnnnnnnnnnnnnnnnnnnnnnnnnnnnnnnnnnnnnnnnnnnnnnnnnnnnnnnnnnnnnnnnnnnnnnnnnnnnnnnnnnnnnnnnnnnnnnnnnnnnnnnnnnnnnnnnnnnnnnnnnnnnnnnnnnnnnnnnnnnnnnnnnnnnnnnnnnnnnnnnnnnnnnnnnnnnnnnnnnnnnnnnnnnnnnnnnnnnnnnnnnnnnnnnnnnnnnnnnnnnnnnnnnnnnnnnnnnnnnnnnnnnnnnnnnnnnnnnnnnnnnnnnnnnnnnnnnnnnnnnnnnnnnnnnnnnnnnnnnnnnnnnnnnnnnnnnnnnnnnnnnnnnnnnnnnnnnnnnnnnnnnnnnnnnnnnnnnnnnnnnnnnnnnnnnnnnnnnnnnnnnnnnnnnnnnnnnnnnnnnnnnnnnnnnnnnnnnnnnnnnnnnnnnnnnnnnnnnnnnnnnnnnnnnnnnnnnnnnnnnnnnnnnnnnnnnnnnnnnnnnnnnnnnnnnnnnnnnnnnnnnnnnnnnnnnnnnnnnnnnnnnnnnnnnnnnnnnnnnnnnnnnnnnnnnnnnnnnnnnnnnnnnnnnnnnnnnnnnnnnnnnnnnnnnnnnnnnnnnnnnnnnnnnnnnnnnnnnnnnnnnnnnnnnnnnnnnnnnnnnnnnnnnnnnnnnnnnnnnnnnnnnnnnnnnnnnnnnnnnnnnnnnnnnnnnnnnnnnnnnnnnnnnnnnnnnnnnnnnnnnnnnnnnnnnnnnnnnnnnnnnnnnnnnnnnnnnnnnnnnnnnnnnnnnnnnnnnnnnnnnnnnnnnnnnnnnnnnnnnnnnnnnnnnnnnnnnnnnnnnnnnnnnnnnnnnnnnnnnnnnnnnnnnnnnnnnnnnnnnnnnnnnnnnnnnnnnnnnnnnnnnnnnnnnnnnnnnnnnnnnnnnnnnnnnnnnnnnnnnnnnnnnnnnnnnnnnnnnnnnnnnnnnnnnnnnnnnnnnnnnnnnnnnnnnnnnnnnnnnnnnnnnnnnnnnnnnnnnnnnnnnnnnnnnnnnnnnnnnnnnnnnnnnnnnnnnnnnnnnnnnnnnnnnnnnnnnnnnnnnnnnnnnnnnnnnnnnnnnnnnnnnnnnnnnnnnnnnnnnnnnnnnnnnnnnnnnnnnnnnnnnnnnnnnnnnnnnnnnnnnnnnnnnnnnnnnnnnnnnnnnnnnnnnnnnnnnnnnnnnnnnnnnnnnnnnnnnnnnnnnnnnnnnnnnnnnnnnnnnnnnnnnnnnnnnnnnnnnnnnnnnnnnnnnnnnnnnnnnnnnnnnnnnnnnnnnnnnnnnnnnnnnnnnnnnnnnnnnnnnnnnnnnnnnnnnnnnnnnnnnnnnnnnnnnnnnnnnnnnnnnnnnnnnnnnnnnnnnnnnnnnnnnnnnnnnnnnnnnnnnnnnnnnnnnnnnnnnnnnnnnnnnnnnnnnnnnnnnnnnnnnnnnnnnnnnnnnnnnnnnnnnnnnnnnnnnnnnnnnnnnnnnnnnnnnnnnnnnnnnnnnnnnnnnnnnnnnnnnnnnnnnnnnnnnnnnnnnnnnnnnnnnnnnnnnnnnnnnnnnnnnnnnnnnnnnnnnnnnnnnnnnnnnnnnnnnnnnnnnnnnnnnnnnnnnnnnnnnnnnnnnnnnnnnnnnnnnnnnnnnnnnnnnnnnnnnnnnnnnnnnnnnnnnnnnnnnnnnnnnnnnnnnnnnnnnnnnnnnnnnnnnnnnnnnnnnnnnnnnnnnnnnnnnnnnnnnnnnnnnnnnnnnnnnnnnnnnnnnnnnnnnnnnnnnnnnnnnnnnnnnnnnnnnnnnnnnnnnnnnnnnnnnnnnnnnnnnnnnnnnnnnnnnnnnnnnnnnnnnnnnnnnnnnnnnnnnnnnnnnnnnnnnnnnnnnnnnnnnnnnnnnnnnnnnnnnnnnnnnnnnnnnnnnnnnnnnnnnnnnnnnnnnnnnnnnnnnnnnnnnnnnnnnnnnnnnnnnnnnnnnnnnnnnnnnnnnnnnnnnnnnnnnnnnnnnnnnnnnnnnnnnnnnnnnnnnnnnnnnnnnnnnnnnnnnnnnnnnnnnnnnnnnnnnnnnnnnnnnnnnnnnnnnnnnnnnnnnnnnnnnnnnnnnnnnnnnnnnnnnnnnnnnnnnnnnnnnnnnnnnnnnnnnnnnnnnnnnnnnnnnnnnnnnnnnnnnnnnnnnnnnnnnnnnnnnnnnnnnnnnnnnnnnnnnnnnnnnnnnnnnnnnnnnnnnnnnnnnnnnnnnnnnnnnnnnnnnnnnnnnnnnnnnnnnnnnnnnnnnnnnnnnnnnnnnnnnnnnnnnnnnnnnnnnnnnnnnnnnnnnnnnnnnnnnnnnnnnnnnnnnnnnnnnnnnnnnnnnnnnnnnnnnnnnnnnnnnnnnnnnnnnnnnnnnnnnnnnnnnnnnnnnnnnnnnnnnnnnnnnnnnnnnnnnnnnnnnnnnnnnnnnnnnnnnnnnnnnnnnnnnnnnnnnnnnnnnnnnnnnnnnnnnnnnnnnnnnnnnnnnnnnnnnnnnnnnnnnnnnnnnnnnnnnnnnnnnnnnnnnnnnnnnnnnnnnnnnnnnnnnnnnnnnnnnnnnnnnnnnnnnnnnnnnnnnnnnnnnnnnnnnnnnnnnnnnnnnnnnnnnnnnnnnnnnnnnnnnnnnnnnnnnnnnnnnnnnnnnnnnnnnnnnnnnnnnnnnnnnnnnnnnnnnnnnnnnnnnnnnnnnnnnnnnnnnnnnnnnnnnnnnnnnnnnnnnnnnnnnnnnnnnnnnnnnnnnnnnnnnnnnnnnnnnnnnnnnnnnnnnnnnnnnnnnnnnnnnnnnnnnnnnnnnnnnnnnnnnnnnnnnnnnnnnnnnnnnnnnnnnnnnnnnnnnnnnnnnnnnnnnnnnnnnnnnnnnnnnnnnnnnnnnnnnnnnnnnnnnnnnnnnnnnnnnnnnnnnnnnnnnnnnnnnnnnnnnnnnnnnnnnnnnnnnnnnnnnnnnnnnnnnnnnnnnnnnnnnnnnnnnnnnnnnnnnnnnnnnnnnnnnnnnnnnnnnnnnnnnnnnnnnnnnnnnnnnnnnnnnnnnnnnnnnnnnnnnnnnnnnnnnnnnnnnnnnnnnnnnnnnnnnnnnnnnnnnnnnnnnnnnnnnnnnnnnnnnnnnnnnnnnnnnnnnnnnnnnnnnnnnnnnnnnnnnnnnnnnnnnnnnnnnnnnnnnnnnnnnnnnnnnnnnnnnnnnnnnnnnnnnnnnnnnnnnnnnnnnnnnnnnnnnnnnnnnnnnnnnnnnnnnnnnnnnnnnnnnnnnnnnnnnnnnnnnnnnnnnnnnnnnnnnnnnnnnnnnnnnnnnnnnnnnnnnnnnnnnnnnnnnnnnnnnnnnnnnnnnnnnnnnnnnnnnnnnnnnnnnnnnnnnnnnnnnnnnnnnnnnnnnnnnnnnnnnnnnnnnnnnnnnnnnnnnnnnnnnnnnnnnnnnnnnnnnnnnnnnnnnnnnnnnnnnnnnnnnnnnnnnnnnnnnnnnnnnnnnnnnnnnnnnnnnnnnnnnnnnnnnnnnnnnnnnnnnnnnnnnnnnnnnnnnnnnnnnnnnnnnnnnnnnnnnnnnnnnnnnnnnnnnnnnnnnnnnnnnnnnnnnnnnnnnnnnnnnnnnnnnnnnnnnnnnnnnnnnnnnnnnnnnnnnnnnnnnnnnnnnnnnnnnnnnnnnnnnnnnnnnnnnnnnnnnnnnnnnnnnnnnnnnnnnnnnnnnnnnnnnnnnnnnnnnnnnnnnnnnnnnnnnnnnnnnnnnnnnnnnnnnnnnnnnnnnnnnnnnnnnnnnnnnnnnnnnnnnnnnnnnnnnnnnnnnnnnnnnnnnnnnnnnnnnnnnnnnnnnnnnnnnnnnnnnnnnnnnnnnnnnnnnnnnnnnnnnnnnnnnnnnnnnnnnnnnnnnnnnnnnnnnnnnnnnnnnnnnnnnnnnnnnnnnnnnnnnnnnnnnnnnnnnnnnnnnnnnnnnnnnnnnnnnnnnnnnnnnnnnnnnnnnnnnnnnnnnnnnnnnnnnnnnnnnnnnnnnnnnnnnnnnnnnnnnnnnnnnnnnnnnnnnnnnnnnnnnnnnnnnnnnnnnnnnnnnnnnnnnnnnnnnnnnnnnnnnnnnnnnnnnnnnnnnnnnnnnnnnnnnnnnnnnnnnnnnnnnnnnnnnnnnnnnnnnnnnnnnnnnnnnnnnnnnnnnnnnnnnnnnnnnnnnnnnnnnnnnnnnnnnnnnnnnnnnnnnnnnnnnnnnnnnnnnnnnnnnnnnnnnnnnnnnnnnnnnnnnnnnnnnnnnnnnnnnnnnnnnnnnnnnnnnnnnnnnnnnnnnnnnnnnnnnnnnnnnnnnnnnnnnnnnnnnnnnnnnnnnnnnnnnnnnnnnnnnnnnnnnnnnnnnnnnnnnnnnnnnnnnnnnnnnnnnnnnnnnnnnnnnnnnnnnnnnnnnnnnnnnnnnnnnnnnnnnnnnnnnnnnnnnnnnnnnnnnnnnnnnnnnnnnnnnnnnnnnnnnnnnnnnnnnnnnnnnnnnnnnnnnnnnnnnnnnnnnnnnnnnnnnnnnnnnnnnnnnnnnnnnnnnnnnnnnnnnnnnnnnnnnnnnnnnnnnnnnnnnnnnnnnnnnnnnnnnnnnnnnnnnnnnnnnnnnnnnnnnnnnnnnnnnnnnnnnnnnnnnnnnnnnnnnnnnnnnnnnnnnnnnnnnnnnnnnnnnnnnnnnnnnnnnnnnnnnnnnnnnnnnnnnnnnnnnnnnnnnnnnnnnnnnnnnnnnnnnnnnnnnnnnnnnnnnnnnnnnnnnnnnnnnnnnnnnnnnnnnnnnnnnnnnnnnnnnnnnnnnnnnnnnnnnnnnnnnnnnnnnnnnnnnnnnnnnnnnnnnnnnnnnnnnnnnnnnnnnnnnnnnnnnnnnnnnnnnnnnnnnnnnnnnnnnnnnnnnnnnnnnnnnnnnnnnnnnnnnnnnnnnnnnnnnnnnnnnnnnnnnnnnnnnnnnnnnnnnnnnnnnnnnnnnnnnnnnnnnnnnnnnnnnnnnnnnnnnnnnnnnnnnnnnnnnnnnnnnnnnnnnnnnnnnnnnnnnnnnnnnnnnnnnnnnnnnnnnnnnnnnnnnnnnnnnnnnnnnnnnnnnnnnnnnnnnnnnnnnnnnnnnnnnnnnnnnnnnnnnnnnnnnnnnnnnnnnnnnnnnnnnnnnnnnnnnnnnnnnnnnnnnnnnnnnnnnnnnnnnnnnnnnnnnnnnnnnnnnnnnnnnnnnnnnnnnnnnnnnnnnnnnnnnnnnnnnnnnnnnnnnnnnnnnnnnnnnnnnnnnnnnnnnnnnnnnnnnnnnnnnnnnnnnnnnnnnnnnnnnnnnnnnnnnnnnnnnnnnnnnnnnnnnnnnnnnnnnnnnnnnnnnnnnnnnnnnnnnnnnnnnnnnnnnnnnnnnnnnnnnnnnnnnnnnnnnnnnnnnnnnnnnnnnnnnnnnnnnnnnnnnnnnnnnnnnnnnnnnnnnnnnnnnnnnnnnnnnnnnnnnnnnnnnnnnnnnnnnnnnnnnnnnnnnnnnnnnnnnnnnnnnnnnnnnnnnnnnnnnnnnnnnnnnnnnnnnnnnnnnnnnnnnnnnnnnnnnnnnnnnnnnnnnnnnnnnnnnnnnnnnnnnnnnnnnnnnnnnnnnnnnnnnnnnnnnnnnnnnnnnnnnnnnnnnnnnnnnnnnnnnnnnnnnnnnnnnnnnnnnnnnnnnnnnnnnnnnnnnnnnnnnnnnnnnnnnnnnnnnnnnnnnnnnnnnnnnnnnnnnnnnnnnnnnnnnnnnnnnnnnnnnnnnnnnnnnnnnnnnnnnnnnnnnnnnnnnnnnnnnnnnnnnnnnnnnnnnnnnnnnnnnnnnnnnnnnnnnnnnnnnnnnnnnnnnnnnnnnnnnnnnnnnnnnnnnnnnnnnnnnnnnnnnnnnnnnnnnnnnnnnnnnnnnnnnnnnnnnnnnnnnnnnnnnnnnnnnnnnnnnnnnnnnnnnnnnnnnnnnnnnnnnnnnnnnnnnnnnnnnnnnnnnnnnnnnnnnnnnnnnnnnnnnnnnnnnnnnnnnnnnnnnnnnnnnnnnnnnnnnnnnnnnnnnnnnnnnnnnnnnnnnnnnnnnnnnnnnnnnnnnnnnnnnnnnnnnnnnnnnnnnnnnnnnnnnnnnnnnnnnnnnnnnnnnnnnnnnnnnnnnnnnnnnnnnnnnnnnnnnnnnnnnnnnnnnnnnnnnnnnnnnnnnnnnnnnnnnnnnnnnnnnnnnnnnnnnnnnnnnnnnnnnnnnnnnnnnnnnnnnnnnnnnnnnnnnnnnnnnnnnnnnnnnnnnnnnnnnnnnnnnnnnnnnnnnnnnnnnnnnnnnnnnnnnnnnnnnnnnnnnnnnnnnnnnnnnnnnnnnnnnnnnnnnnnnnnnnnnnnnnnnnnnnnnnnnnnnnnnnnnnnnnnnnnnnnnnnnnnnnnnnnnnnnnnnnnnnnnnnnnnnnnnnnnnnnnnnnnnnnnnnnnnnnnnnnnnnnnnnnnnnnnnnnnnnnnnnnnnnnnnnnnnnnnnnnnnnnnnnnnnnnnnnnnnnnnnnnnnnnnnnnnnnnnnnnnnnnnnnnnnnnnnnnnnnnnnnnnnnnnnnnnnnnnnnnnnnnnnnnnnnnnnnnnnnnnnnnnnnnnnnnnnnnnnnnnnnnnnnnnnnnnnnnnnnnnnnnnnnnnnnnnnnnnnnnnnnnnnnnnnnnnnnnnnnnnnnnnnnnnnnnnnnnnnnnnnnnnnnnnnnnnnnnnnnnnnnnnnnnnnnnnnnnnnnnnnnnnnnnnnnnnnnnnnnnnnnnnnnnnnnnnnnnnnnnnnnnnnnnnnnnnnnnnnnnnnnnnnnnnnnnnnnnnnnnnnnnnnnnnnnnnnnnnnnnnnnnnnnnnnnnnnnnnnnnnnnnnnnnnnnnnnnnnnnnnnnnnnnnnnnnnnnnnnnnnnnnnnnnnnnnnnnnnnnnnnnnnnnnnnnnnnnnnnnnnnnnnnnnnnnnnnnnnnnnnnnnnnnnnnnnnnnnnnnnnnnnnnnnnnnnnnnnnnnnnnnnnnnnnnnnnnnnnnnnnnnnnnnnnnnnnnnnnnnnnnnnnnnnnnnnnnnnnnnnnnnnnnnnnnnnnnnnnnnnnnnnnnnnnnnnnnnnnnnnnnnnnnnnnnnnnnnnnnnnnnnnnnnnnnnnnnnnnnnnnnnnnnnnnnnnnnnnnnnnnnnnnnnnnnnnnnnnnnnnnnnnnnnnnnnnnnnnnnnnnnnnnnnnnnnnnnnnnnnnnnnnnnnnnnnnnnnnnnnnnnnnnnnnnnnnnnnnnnnnnnnnnnnnnnnnnnnnnnnnnnnnnnnnnnnnnnnnnnnnnnnnnnnnnnnnnnnnnnnnnnnnnnnnnnnnnnnnnnnnnnnnnnnnnnnnnnnnnnnnnnnnnnnnnnnnnnnnnnnnnnnnnnnnnnnnnnnnnnnnnnnnnnnnnnnnnnnnnnnnnnnnnnnnnnnnnnnnnnnnnnnnnnnnnnnnnnnnnnnnnnnnnnnnnnnnnnnnnnnnnnnnnnnnnnnnnnnnnnnnnnnnnnnnnnnnnnnnnnnnnnnnnnnnnnnnnnnnnnnnnnnnnnnnnnnnnnnnnnnnnnnnnnnnnnnnnnnnnnnnnnnnnnnnnnnnnnnnnnnnnnnnnnnnnnnnnnnnnnnnnnnnnnnnnnnnnnnnnnnnnnnnnnnnnnnnnnnnnnnnnnnnnnnnnnnnnnnnnnnnnnnnnnnnnnnnnnnnnnnnnnnnnnnnnnnnnnnnnnnnnnnnnnnnnnnnnnnnnnnnnnnnnnnnnnnnnnnnnnnnnnnnnnnnnnnnnnnnnnnnnnnnnnnnnnnnnnnnnnnnnnnnnnnnnnnnnnnnnnnnnnnnnnnnnnnnnnnnnnnnnnnnnnnnnnnnnnnnnnnnnnnnnnnnnnnnnnnnnnnnnnnnnnnnnnnnnnnnnnnnnnnnnnnnnnnnnnnnnnnnnnnnnnnnnnnnnnnnnnnnnnnnnnnnnnnnnnnnnnnnnnnnnnnnnnnnnnnnnnnnnnnnnnnnnnnnnnnnnnnnnnnnnnnnnnnnnnnnnnnnnnnnnnnnnnnnnnnnnnnnnnnnnnnnnnnnnnnnnnnnnnnnnnnnnnnnnnnnnnnnnnnnnnnnnnnnnnnnnnnnnnnnnnnnnnnnnnnnnnnnnnnnnnnnnnnnnnnnnnnnnnnnnnnnnnnnnnnnnnnnnnnnnnnnnnnnnnnnnnnnnnnnnnnnnnnnnnnnnnnnnnnnnnnnnnnnnnnnnnnnnnnnnnnnnnnnnnnnnnnnnnnnnnnnnnnnnnnnnnnnnnnnnnnnnnnnnnnnnnnnnnnnnnnnnnnnnnnnnnnnnnnnnnnnnnnnnnnnnnnnnnnnnnnnnnnnnnnnnnnnnnnnnnnnnnnnnnnnnnnnnnnnnnnnnnnnnnnnnnnnnnnnnnnnnnnnnnnnnnnnnnnnnnnnnnnnnnnnnnnnnnnnnnnnnnnnnnnnnnnnnnnnnnnnnnnnnnnnnnnnnnnnnnnnnnnnnnnnnnnnnnnnnnnnnnnnnnnnnnnnnnnnnnnnnnnnnnnnnnnnnnnnnnnnnnnnnnnnnnnnnnnnnnnnnnnnnnnnnnnnnnnnnnnnnnnnnnnnnnnnnnnnnnnnnnnnnnnnnnnnnnnnnnnnnnnnnnnnnnnnnnnnnnnnnnnnnnnnnnnnnnnnnnnnnnnnnnnnnnnnnnnnnnnnnnnnnnnnnnnnnnnnnnnnnnnnnnnnnnnnnnnnnnnnnnnnnnnnnnnnnnnnnnnnnnnnnnnnnnnnnnnnnnnnnnnnnnnnnnnnnnnnnnnnnnnnnnnnnnnnnnnnnnnnnnnnnnnnnnnnnnnnnnnnnnnnnnnnnnnnnnnnnnnnnnnnnnnnnnnnnnnnnnnnnnnnnnnnnnnnnnnnnnnnnnnnnnnnnnnnnnnnnnnnnnnnnnnnnnnnnnnnnnnnnnnnnnnnnnnnnnnnnnnnnnnnnnnnnnnnnnnnnnnnnnnnnnnnnnnnnnnnnnnnnnnnnnnnnnnnnnnnnnnnnnnnnnnnnnnnnnnnnnnnnnnnnnnnnnnnnnnnnnnnnnnnnnnnnnnnnnnnnnnnnnnnnnnnnnnnnnnnnnnnnnnnnnnnnnnnnnnnnnnnnnnnnnnnnnnnnnnnnnnnnnnnnnnnnnnnnnnnnnnnnnnnnnnnnnnnnnnnnnnnnnnnnnnnnnnnnnnnnnnnnnnnnnnnnnnnnnnnnnnnnnnnnnnnnnnnnnnnnnnnnnnnnnnnnnnnnnnnnnnnnnnnnnnnnnnnnnnnnnnnnnnnnnnnnnnnnnnnnnnnnnnnnnnnnnnnnnnnnnnnnnnnnnnnnnnnnnnnnnnnnnnnnnnnnnnnnnnnnnnnnnnnnnnnnnnnnnnnnnnnnnnnnnnnnnnnnnnnnnnnnnnnnnnnnnnnnnnnnnnnnnnnnnnnnnnnnnnnnnnnnnnnnnnnnnnnnnnnnnnnnnnnnnnnnnnnnnnnnnnnnnnnnnnnnnnnnnnnnnnnnnnnnnnnnnnnnnnnnnnnnnnnnnnnnnnnnnnnnnnnnnnnnnnnnnnnnnnnnnnnnnnnnnnnnnnnnnnnnnnnnnnnnnnnnnnnnnnnnnnnnnnnnnnnnnnnnnnnnnnnnnnnnnnnnnnnnnnnnnnnnnnnnnnnnnnnnnnnnnnnnnnnnnnnnnnnnnnnnnnnnnnnnnnnnnnnnnnnnnnnnnnnnnnnnnnnnnnnnnnnnnnnnnnnnnnnnnnnnnnnnnnnnnnnnnnnnnnnnnnnnnnnnnnnnnnnnnnnnnnnnnnnnnnnnnnnnnnnnnnnnnnnnnnnnnnnnnnnnnnnnnnnnnnnnnnnnnnnnnnnnnnnnnnnnnnnnnnnnnnnnnnnnnnnnnnnnnnnnnnnnnnnnnnnnnnnnnnnnnnnnnnnnnnnnnnnnnnnnnnnnnnnnnnnnnnnnnnnnnnnnnnnnnnnnnnnnnnnnnnnnnnnnnnnnnnnnnnnnnnnnnnnnnnnnnnnnnnnnnnnnnnnnnnnnnnnnnnnnnnnnnnnnnnnnnnnnnnnnnnnnnnnnnnnnnnnnnnnnnnnnnnnnnnnnnnnnnnnnnnnnnnnnnnnnnnnnnnnnnnnnnnnnnnnnnnnnnnnnnnnnnnnnnnnnnnnnnnnnnnnnnnnnnnnnnnnnnnnnnnnnnnnnnnnnnnnnnnnnnnnnnnnnnnnnnnnnnnnnnnnnnnnnnnnnnnnnnnnnnnnnnnnnnnnnnnnnnnnnnnnnnnnnnnnnnnnnnnnnnnnnnnnnnnnnnnnnnnnnnnnnnnnnnnnnnnnnnnnnnnnnnnnnnnnnnnnnnnnnnnnnnnnnnnnnnnnnnnnnnnnnnnnnnnnnnnnnnnnnnnnnnnnnnnnnnnnnnnnnnnnnnnnnnnnnnnnnnnnnnnnnnnnnnnnnnnnnnnnnnnnnnnnnnnnnnnnnnnnnnnnnnnnnnnnnnnnnnnnnnnnnnnnnnnnnnnnnnnnnnnnnnnnnnnnnnnnnnnnnnnnnnnnnnnnnnnnnnnnnnnnnnnnnnnnnnnnnnnnnnnnnnnnnnnnnnnnnnnnnnnnnnnnnnnnnnnnnnnnnnnnnnnnnnnnnnnnnnnnnnnnnnnnnnnnnnnnnnnnnnnnnnnnnnnnnnnnnnnnnnnnnnnnnnnnnnnnnnnnnnnnnnnnnnnnnnnnnnnnnnnnnnnnnnnnnnnnnnnnnnnnnnnnnnnnnnnnnnnnnnnnnnnnnnnnnnnnnnnnnnnnnnnnnnnnnnnnnnnnnnnnnnnnnnnnnnnnnnnnnnnnnnnnnnnnnnnnnnnnnnnnnnnnnnnnnnnnnnnnnnnnnnnnnnnnnnnnnnnnnnnnnnnnnnnnnnnnnnnnnnnnnnnnnnnnnnnnnnnnnnnnnnnnnnnnnnnnnnnnnnnnnnnnnnnnnnnnnnnnnnnnnnnnnnnnnnnnnnnnnnnnnnnnnnnnnnnnnnnnnnnnnnnnnnnnnnnnnnnnnnnnnnnnnnnnnnnnnnnnnnnnnnnnnnnnnnnnnnnnnnnnnnnnnnnnnnnnnnnnnnnnnnnnnnnnnnnnnnnnnnnnnnnnnnnnnnnnnnnnnnnnnnnnnnnnnnnnnnnnnnnnnnnnnnnnnnnnnnnnnnnnnnnnnnnnnnnnnnnnnnnnnnnnnnnnnnnnnnnnnnnnnnnnnnnnnnnnnnnnnnnnnnnnnnnnnnnnnnnnnnnnnnnnnnnnnnnnnnnnnnnnnnnnnnnnnnnnnnnnnnnnnnnnnnnnnnnnnnnnnnnnnnnnnnnnnnnnnnnnnnnnnnnnnnnnnnnnnnnnnnnnnnnnnnnnnnnnnnnnnnnnnnnnnnnnnnnnnnnnnnnnnnnnnnnnnnnnnnnnnnnnnnnnnnnnnnnnnnnnnnnnnnnnnnnnnnnnnnnnnnnnnnnnnnnnnnnnnnnnnnnnnnnnnnnnnnnnnnnnnnnnnnnnnnnnnnnnnnnnnnnnnnnnnnnnnnnnnnnnnnnnnnnnnnnnnnnnnnnnnnnnnnnnnnnnnnnnnnnnnnnnnnnnnnnnnnnnnnnnnnnnnnnnnnnnnnnnnnnnnnnnnnnnnnnnnnnnnnnnnnnnnnnnnnnnnnnnnnnnnnnnnnnnnnnnnnnnnnnnnnnnnnnnnnnnnnnnnnnnnnnnnnnnnnnnnnnnnnnnnnnnnnnnnnnnnnnnnnnnnnnnnnnnnnnnnnnnnnnnnnnnnnnnnnnnnnnnnnnnnnnnnnnnnnnnnnnnnnnnnnnnnnnnnnnnnnnnnnnnnnnnnnnnnnnnnnnnnnnnnnnnnnnnnnnnnnnnnnnnnnnnnnnnnnnnnnnnnnnnnnnnnnnnnnnnnnnnnnnnnnnnnnnnnnnnnnnnnnnnnnnnnnnnnnnnnnnnnnnnnnnnnnnnnnnnnnnnnnnnnnnnnnnnnnnnnnnnnnnnnnnnnnnnnnnnnnnnnnnnnnnnnnnnnnnnnnnnnnnnnnnnnnnnnnnnnnnnnnnnnnnnnnnnnnnnnnnnnnnnnnnnnnnnnnnnnnnnnnnnnnnnnnnnnnnnnnnnnnnnnnnnnnnnnnnnnnnnnnnnnnnnnnnnnnnnnnnnnnnnnnnnnnnnnnnnnnnnnnnnnnnnnnnnnnnnnnnnnnnnnnnnnnnnnnnnnnnnnnnnnnnnnnnnnnnnnnnnnnnnnnnnnnnnnnnnnnnnnnnnnnnnnnnnnnnnnnnnnnnnnnnnnnnnnnnnnnnnnnnnnnnnnnnnnnnnnnnnnnnnnnnnnnnnnnnnnnnnnnnnnnnnnnnnnnnnnnnnnnnnnnnnnnnnnnnnnnnnnnnnnnnnnnnnnnnnnnnnnnnnnnnnnnnnnnnnnnnnnnnnnnnnnnnnnnnnnnnnnnnnnnnnnnnnnnnnnnnnnnnnnnnnnnnnnnnnnnnnnnnnnnnnnnnnnnnnnnnnnnnnnnnnnnnnnnnnnnnnnnnnnnnnnnnnnnnnnnnnnnnnnnnnnnnnnnnnnnnnnnnnnnnnnnnnnnnnnnnnnnnnnnnnnnnnnnnnnnnnnnnnnnnnnnnnnnnnnnnnnnnnnnnnnnnnnnnnnnnnnnnnnnnnnnnnnnnnnnnnnnnnnnnnnnnnnnnnnnnnnnnnnnnnnnnnnnnnnnnnnnnnnnnnnnnnnnnnnnnnnnnnnnnnnnnnnnnnnnnnnnnnnnnnnnnnnnnnnnnnnnnnnnnnnnnnnnnnnnnnnnnnnnnnnnnnnnnnnnnnnnnnnnnnnnnnnnnnnnnnnnnnnnnnnnnnnnnnnnnnnnnnnnnnnnnnnnnnnnnnnnnnnnnnnnnnnnnnnnnnnnnnnnnnnnnnnnnnnnnnnnnnnnnnnnnnnnnnnnnnnnnnnnnnnnnnnnnnnnnnnnnnnnnnnnnnnnnnnnnnnnnnnnnnnnnnnnnnnnnnnnnnnnnnnnnnnnnnnnnnnnnnnnnnnnnnnnnnnnnnnnnnnnnnnnnnnnnnnnnnnnnnnnnnnnnnnnnnnnnnnnnnnnnnnnnnnnnnnnnnnnnnnnnnnnnnnnnnnnnnnnnnnnnnnnnnnnnnnnnnnnnnnnnnnnnnnnnnnnnnnnnnnnnnnnnnnnnnnnnnnnnnnnnnnnnnnnnnnnnnnnnnnnnnnnnnnnnnnnnnnnnnnnnnnnnnnnnnnnnnnnnnnnnnnnnnnnnnnnnnnnnnnnnnnnnnnnnnnnnnnnnnnnnnnnnnnnnnnnnnnnnnnnnnnnnnnnnnnnnnnnnnnnnnnnnnnnnnnnnnnnnnnnnnnnnnnnnnnnnnnnnnnnnnnnnnnnnnnnnnnnnnnnnnnnnnnnnnnnnnnnnnnnnnnnnnnnnnnnnnnnnnnnnnnnnnnnnnnnnnnnnnnnnnnnnnnnnnnnnnnnnnnnnnnnnnnnnnnnnnnnnnnnnnnnnnnnnnnnnnnnnnnnnnnnnnnnnnnnnnnnnnnnnnnnnnnnnnnnnnnnnnnnnnnnnnnnnnnnnnnnnnnnnnnnnnnnnnnnnnnnnnnnnnnnnnnnnnnnnnnnnnnnnnnnnnnnnnnnnnnnnnnnnnnnnnnnnnnnnnnnnnnnnnnnnnnnnnnnnnnnnnnnnnnnnnnnnnnnnnnnnnnnnnnnnnnnnnnnnnnnnnnnnnnnnnnnnnnnnnnnnnnnnnnnnnnnnnnnnnnnnnnnnnnnnnnnnnnnnnnnnnnnnnnnnnnnnnnnnnnnnnnnnnnnnnnnnnnnnnnnnnnnnnnnnnnnnnnnnnnnnnnnnnnnnnnnnnnnnnnnnnnnnnnnnnnnnnnnnnnnnnnnnnnnnnnnnnnnnnnnnnnnnnnnnnnnnnnnnnnnnnnnnnnnnnnnnnnnnnnnnnnnnnnnnnnnnnnnnnnnnnnnnnnnnnnnnnnnnnnnnnnnnnnnnnnnnnnnnnnnnnnnnnnnnnnnnnnnnnnnnnnnnnnnnnnnnnnnnnnnnnnnnnnnnnnnnnnnnnnnnnnnnnnnnnnnnnnnnnnnnnnnnnnnnnnnnnnnnnnnnnnnnnnnnnnnnnnnnnnnnnnnnnnnnnnnnnnnnnnnnnnnnnnnnnnnnnnnnnnnnnnnnnnnnnnnnnnnnnnnnnnnnnnnnnnnnnnnnnnnnnnnnnnnnnnnnnnnnnnnnnnnnnnnnnnnnnnnnnnnnnnnnnnnnnnnnnnnnnnnnnnnnnnnnnnnnnnnnnnnnnnnnnnnnnnnnnnnnnnnnnnnnnnnnnnnnnnnnnnnnnnnnnnnnnnnnnnnnnnnnnnnnnnnnnnnnnnnnnnnnnnnnnnnnnnnnnnnnnnnnnnnnnnnnnnnnnnnnnnnnnnnnnnnnnnnnnnnnnnnnnnnnnnnnnnnnnnnnnnnnnnnnnnnnnnnnnnnnnnnnnnnnnnnnnnnnnnnnnnnnnnnnnnnnnnnnnnnnnnnnnnnnnnnnnnnnnnnnnnnnnnnnnnnnnnnnnnnnnnnnnnnnnnnnnnnnnnnnnnnnnnnnnnnnnnnnnnnnnnnnnnnnnnnnnnnnnnnnnnnnnnnnnnnnnnnnnnnnnnnnnnnnnnnnnnnnnnnnnnnnnnnnnnnnnnnnnnnnnnnnnnnnnnnnnnnnnnnnnnnnnnnnnnnnnnnnnnnnnnnnnnnnnnnnnnnnnnnnnnnnnnnnnnnnnnnnnnnnnnnnnnnnnnnnnnnnnnnnnnnnnnnnnnnnnnnnnnnnnnnnnnnnnnnnnnnnnnnnnnnnnnnnnnnnnnnnnnnnnnnnnnnnnnnnnnnnnnnnnnnnnnnnnnnnnnnnnnnnnnnnnnnnnnnnnnnnnnnnnnnnnnnnnnnnnnnnnnnnnnnnnnnnnnnnnnnnnnnnnnnnnnnnnnnnnnnnnnnnnnnnnnnnnnnnnnnnnnnnnnnnnnnnnnnnnnnnnnnnnnnnnnnnnnnnnnnnnnnnnnnnnnnnnnnnnnnnnnnnnnnnnnnnnnnnnnnnnnnnnnnnnnnnnnnnnnnnnnnnnnnnnnnnnnnnnnnnnnnnnnnnnnnnnnnnnnnnnnnnnnnnnnnnnnnnnnnnnnnnnnnnnnnnnnnnnnnnnnnnnnnnnnnnnnnnnnnnnnnnnnnnnnnnnnnnnnnnnnnnnnnnnnnnnnnnnnnnnnnnnnnnnnnnnnnnnnnnnnnnnnnnnnnnnnnnnnnnnnnnnnnnnnnnnnnnnnnnnnnnnnnnnnnnnnnnnnnnnnnnnnnnnnnnnnnnnnnnnnnnnnnnnnnnnnnnnnnnnnnnnnnnnnnnnnnnnnnnnnnnnnnnnnnnnnnnnnnnnnnnnnnnnnnnnnnnnnnnnnnnnnnnnnnnnnnnnnnnnnnnnnnnnnnnnnnnnnnnnnnnnnnnnnnnnnnnnnnnnnnnnnnnnnnnnnnnnnnnnnnnnnnnnnnnnnnnnnnnnnnnnnnnnnnnnnnnnnnnnnnnnnnnnnnnnnnnnnnnnnnnnnnnnnnnnnnnnnnnnnnnnnnnnnnnnnnnnnnnnnnnnnnnnnnnnnnnnnnnnnnnnnnnnnnnnnnnnnnnnnnnnnnnnnnnnnnnnnnnnnnnnnnnnnnnnnnnnnnnnnnnnnnnnnnnnnnnnnnnnnnnnnnnnnnnnnnnnnnnnnnnnnnnnnnnnnnnnnnnnnnnnnnnnnnnnnnnnnnnnnnnnnnnnnnnnnnnnnnnnnnnnnnnnnnnnnnnnnnnnnnnnnnnnnnnnnnnnnnnnnnnnnnnnnnnnnnnnnnnnnnnnnnnnnnnnnnnnnnnnnnnnnnnnnnnnnnnnnnnnnnnnnnnnnnnnnnnnnnnnnnnnnnnnnnnnnnnnnnnnnnnnnnnnnnnnnnnnnnnnnnnnnnnnnnnnnnnnnnnnnnnnnnnnnnnnnnnnnnnnnnnnnnnnnnnnnnnnnnnnnnnnnnnnnnnnnnnnnnnnnnnnnnnnnnnnnnnnnnnnnnnnnnnnnnnnnnnnnnnnnnnnnnnnnnnnnnnnnnnnnnnnnnnnnnnnnnnnnnnnnnnnnnnnnnnnnnnnnnnnnnnnnnnnnnnnnnnnnnnnnnnnnnnnnnnnnnnnnnnnnnnnnnnnnnnnnnnnnnnnnnnnnnnnnnnnnnnnnnnnnnnnnnnnnnnnnnnnnnnnnnnnnnnnnnnnnnnnnnnnnnnnnnnnnnnnnnnnnnnnnnnnnnnnnnnnnnnnnnnnnnnnnnnnnnnnnnnnnnnnnnnnnnnnnnnnnnnnnnnnnnnnnnnnnnnnnnnnnnnnnnnnnnnnnnnnnnnnnnnnnnnnnnnnnnnnnnnnnnnnnnnnnnnnnnnnnnnnnnnnnnnnnnnnnnnnnnnnnnnnnnnnnnnnnnnnnnnnnnnnnnnnnnnnnnnnnnnnnnnnnnnnnnnnnnnnnnnnnnnnnnnnnnnnnnnnnnnnnnnnnnnnnnnnnnnnnnnnnnnnnnnnnnnnnnnnnnnnnnnnnnnnnnnnnnnnnnnnnnnnnnnnnnnnnnnnnnnnnnnnnnnnnnnnnnnnnnnnnnnnnnnnnnnnnnnnnnnnnnnnnnnnnnnnnnnnnnnnnnnnnnnnnnnnnnnnnnnnnnnnnnnnnnnnnnnnnnnnnnnnnnnnnnnnnnnnnnnnnnnnnnnnnnnnnnnnnnnnnnnnnnnnnnnnnnnnnnnnnnnnnnnnnnnnnnnnnnnnnnnnnnnnnnnnnnnnnnnnnnnnnnnnnnnnnnnnnnnnnnnnnnnnnnnnnnnnnnnnnnnnnnnnnnnnnnnnnnnnnnnnnnnnnnnnnnnnnnnnnnnnnnnnnnnnnnnnnnnnnnnnnnnnnnnnnnnnnnnnnnnnnnnnnnnnnnnnnnnnnnnnnnnnnnnnnnnnnnnnnnnnnnnnnnnnnnnnnnnnnnnnnnnnnnnnnnnnnnnnnnnnnnnnnnnnnnnnnnnnnnnnnnnnnnnnnnnnnnnnnnnnnnnnnnnnnnnnnnnnnnnnnnnnnnnnnnnnnnnnnnnnnnnnnnnnnnnnnnnnnnnnnnnnnnnnnnnnnnnnnnnnnnnnnnnnnnnnnnnnnnnnnnnnnnnnnnnnnnnnnnnnnnnnnnnnnnnnnnnnnnnnnnnnnnnnnnnnnnnnnnnnnnnnnnnnnnnnnnnnnnnnnnnnnnnnnnnnnnnnnnnnnnnnnnnnnnnnnnnnnnnnnnnnnnnnnnnnnnnnnnnnnnnnnnnnnnnnnnnnnnnnnnnnnnnnnnnnnnnnnnnnnnnnnnnnnnnnnnnnnnnnnnnnnnnnnnnnnnnnnnnnnnnnnnnnnnnnnnnnnnnnnnnnnnnnnnnnnnnnnnnnnnnnnnnnnnnnnnnnnnnnnnnnnnnnnnnnnnnnnnnnnnnnnnnnnnnnnnnnnnnnnnnnnnnnnnnnnnnnnnnnnnnnnnnnnnnnnnnnnnnnnnnnnnnnnnnnnnnnnnnnnnnnnnnnnnnnnnnnnnnnnnnnnnnnnnnnnnnnnnnnnnnnnnnnnnnnnnnnnnnnnnnnnnnnnnnnnnnnnnnnnnnnnnnnnnnnnnnnnnnnnnnnnnnnnnnnnnnnnnnnnnnnnnnnnnnnnnnnnnnnnnnnnnnnnnnnnnnnnnnnnnnnnnnnnnnnnnnnnnnnnnnnnnnnnnnnnnnnnnnnnnnnnnnnnnnnnnnnnnnnnnnnnnnnnnnnnnnnnnnnnnnnnnnnnnnnnnnnnnnnnnnnnnnnnnnnnnnnnnnnnnnnnnnnnnnnnnnnnnnnnnnnnnnnnnnnnnnnnnnnnnnnnnnnnnnnnnnnnnnnnnnnnnnnnnnnnnnnnnnnnnnnnnnnnnnnnnnnnnnnnnnnnnnnnnnnnnnnnnnnnnnnnnnnnnnnnnnnnnnnnnnnnnnnnnnnnnnnnnnnnnnnnnnnnnnnnnnnnnnnnnnnnnnnnnnnnnnnnnnnnnnnnnnnnnnnnnnnnnnnnnnnnnnnnnnnnnnnnnnnnnnnnnnnnnnnnnnnnnnnnnnnnnnnnnnnnnnnnnnnnnnnnnnnnnnnnnnnnnnnnnnnnnnnnnnnnnnnnnnnnnnnnnnnnnnnnnnnnnnnnnnnnnnnnnnnnnnnnnnnnnnnnnnnnnnnnnnnnnnnnnnnnnnnnnnnnnnnnnnnnnnnnnnnnnnnnnnnnnnnnnnnnnnnnnnnnnnnnnnnnnnnnnnnnnnnnnnnnnnnnnnnnnnnnnnnnnnnnnnnnnnnnnnnnnnnnnnnnnnnnnnnnnnnnnnnnnnnnnnnnnnnnnnnnnnnnnnnnnnnnnnnnnnnnnnnnnnnnnnnnnnnnnnnnnnnnnnnnnnnnnnnnnnnnnnnnnnnnnnnnnnnnnnnnnnnnnnnnnnnnnnnnnnnnnnnnnnnnnnnnnnnnnnnnnnnnnnnnnnnnnnnnnnnnnnnnnnnnnnnnnnnnnnnnnnnnnnnnnnnnnnnnnnnnnnnnnnnnnnnnnnnnnnnnnnnnnnnnnnnnnnnnnnnnnnnnnnnnnnnnnnnnnnnnnnnnnnnnnnnnnnnnnnnnnnnnnnnnnnnnnnnnnnnnnnnnnnnnnnnnnnnnnnnnnnnnnnnnnnnnnnnnnnnnnnnnnnnnnnnnnnnnnnnnnnnnnnnnnnnnnnnnnnnnnnnnnnnnnnnnnnnnnnnnnnnnnnnnnnnnnnnnnnnnnnnnnnnnnnnnnnnnnnnnnnnnnnnnnnnnnnnnnnnnnnnnnnnnnnnnnnnnnnnnnnnnnnnnnnnnnnnnnnnnnnnnnnnnnnnnnnnnnnnnnnnnnnnnnnnnnnnnnnnnnnnnnnnnnnnnnnnnnnnnnnnnnnnnnnnnnnnnnnnnnnnnnnnnnnnnnnnnnnnnnnnnnnnnnnnnnnnnnnnnnnnnnnnnnnnnnnnnnnnnnnnnnnnnnnnnnnnnnnnnnnnnnnnnnnnnnnnnnnnnnnnnnnnnnnnnnnnnnnnnnnnnnnnnnnnnnnnnnnnnnnnnnnnnnnnnnnnnnnnnnnnnnnnnnnnnnnnnnnnnnnnnnnnnnnnnnnnnnnnnnnnnnnnnnnnnnnnnnnnnnnnnnnnnnnnnnnnnnnnnnnnnnnnnnnnnnnnnnnnnnnnnnnnnnnnnnnnnnnnnnnnnnnnnnnnnnnnnnnnnnnnnnnnnnnnnnnnnnnnnnnnnnnnnnnnnnnnnnnnnnnnnnnnnnnnnnnnnnnnnnnnnnnnnnnnnnnnnnnnnnnnnnnnnnnnnnnnnnnnnnnnnnnnnnnnnnnnnnnnnnnnnnnnnnnnnnnnnnnnnnnnnnnnnnnnnnnnnnnnnnnnnnnnnnnnnnnnnnnnnnnnnnnnnnnnnnnnnnnnnnnnnnnnnnnnnnnnnnnnnnnnnnnnnnnnnnnnnnnnnnnnnnnnnnnnnnnnnnnnnnnnnnnnnnnnnnnnnnnnnnnnnnnnnnnnnnnnnnnnnnnnnnnnnnnnnnnnnnnnnnnnnnnnnnnnnnnnnnnnnnnnnnnnnnnnnnnnnnnnnnnnnnnnnnnnnnnnnnnnnnnnnnnnnnnnnnnnnnnnnnnnnnnnnnnnnnnnnnnnnnnnnnnnnnnnnnnnnnnnnnnnnnnnnnnnnnnnnnnnnnnnnnnnnnnnnnnnnnnnnnnnnnnnnnnnnnnnnnnnnnnnnnnnnnnnnnnnnnnnnnnnnnnnnnnnnnnnnnnnnnnnnnnnnnnnnnnnnnnnnnnnnnnnnnnnnnnnnnnnnnnnnnnnnnnnnnnnnnnnnnnnnnnnnnnnnnnnnnnnnnnnnnnnnnnnnnnnnnnnnnnnnnnnnnnnnnnnnnnnnnnnnnnnnnnnnnnnnnnnnnnnnnnnnnnnnnnnnnnnnnnnnnnnnnnnnnnnnnnnnnnnnnnnnnnnnnnnnnnnnnnnnnnnnnnnnnnnnnnnnnnnnnnnnnnnnnnnnnnnnnnnnnnnnnnnnnnnnnnnnnnnnnnnnnnnnnnnnnnnnnnnnnnnnnnnnnnnnnnnnnnnnnnnnnnnnnnnnnnnnnnnnnnnnnnnnnnnnnnnnnnnnnnnnnnnnnnnnnnnnnnnnnnnnnnnnnnnnnnnnnnnnnnnnnnnnnnnnnnnnnnnnnnnnnnnnnnnnnnnnnnnnnnnnnnnnnnnnnnnnnnnnnnnnnnnnnnnnnnnnnnnnnnnnnnnnnnnnnnnnnnnnnnnnnnnnnnnnnnnnnnnnnnnnnnnnnnnnnnnnnnnnnnnnnnnnnnnnnnnnnnnnnnnnnnnnnnnnnnnnnnnnnnnnnnnnnnnnnnnnnnnnnnnnnnnnnnnnnnnnnnnnnnnnnnnnnnnnnnnnnnnnnnnnnnnnnnnnnnnnnnnnnnnnnnnnnnnnnnnnnnnnnnnnnnnnnnnnnnnnnnnnnnnnnnnnnnnnnnnnnnnnnnnnnnnnnnnnnnnnnnnnnnnnnnnnnnnnnnnnnnnnnnnnnnnnnnnnnnnnnnnnnnnnnnnnnnnnnnnnnnnnnnnnnnnnnnnnnnnnnnnnnnnnnnnnnnnnnnnnnnnnnnnnnnnnnnnnnnnnnnnnnnnnnnnnnnnnnnnnnnnnnnnnnnnnnnnnnnnnnnnnnnnnnnnnnnnnnnnnnnnnnnnnnnnnnnnnnnnnnnnnnnnnnnnnnnnnnnnnnnnnnnnnnnnnnnnnnnnnnnnnnnnnnnnnnnnnnnnnnnnnnnnnnnnnnnnnnnnnnnnnnnnnnnnnnnnnnnnnnnnnnnnnnnnnnnnnnnnnnnnnnnnnnnnnnnnnnnnnnnnnnnnnnnnnnnnnnnnnnnnnnnnnnnnnnnnnnnnnnnnnnnnnnnnnnnnnnnnnnnnnnnnnnnnnnnnnnnnnnnnnnnnnnnnnnnnnnnnnnnnnnnnnnnnnnnnnnnnnnnnnnnnnnnnnnnnnnnnnnnnnnnnnnnnnnnnnnnnnnnnnnnnnnnnnnnnnnnnnnnnnnnnnnnnnnnnnnnnnnnnnnnnnnnnnnnnnnnnnnnnnnnnnnnnnnnnnnnnnnnnnnnnnnnnnnnnnnnnnnnnnnnnnnnnnnnnnnnnnnnnnnnnnnnnnnnnnnnnnnnnnnnnnnnnnnnnnnnnnnnnnnnnnnnnnnnnnnnnnnnnnnnnnnnnnnnnnnnnnnnnnnnnnnnnnnnnnnnnnnnnnnnnnnnnnnnnnnnnnnnnnnnnnnnnnnnnnnnnnnnnnnnnnnnnnnnnnnnnnnnnnnnnnnnnnnnnnnnnnnnnnnnnnnnnnnnnnnnnnnnnnnnnnnnnnnnnnnnnnnnnnnnnnnnnnnnnnnnnnnnnnnnnnnnnnnnnnnnnnnnnnnnnnnnnnnnnnnnnnnnnnnnnnnnnnnnnnnnnnnnnnnnnnnnnnnnnnnnnnnnnnnnnnnnnnnnnnnnnnnnnnnnnnnnnnnnnnnnnnnnnnnnnnnnnnnnnnnnnnnnnnnnnnnnnnnnnnnnnnnnnnnnnnnnnnnnnnnnnnnnnnnnnnnnnnnnnnnnnnnnnnnnnnnnnnnnnnnnnnnnnnnnnnnnnnnnnnnnnnnnnnnnnnnnnnnnnnnnnnnnnnnnnnnnnnnnnnnnnnnnnnnnnnnnnnnnnnnnnnnnnnnnnnnnnnnnnnnnnnnnnnnnnnnnnnnnnnnnnnnnnnnnnnnnnnnnnnnnnnnnnnnnnnnnnnnnnnnnnnnnnnnnnnnnnnnnnnnnnnnnnnnnnnnnnnnnnnnnnnnnnnnnnnnnnnnnnnnnnnnnnnnnnnnnnnnnnnnnnnnnnnnnnnnnnnnnnnnnnnnnnnnnnnnnnnnnnnnnnnnnnnnnnnnnnnnnnnnnnnnnnnnnnnnnnnnnnnnnnnnnnnnnnnnnnnnnnnnnnnnnnnnnnnnnnnnnnnnnnnnnnnnnnnnnnnnnnnnnnnnnnnnnnnnnnnnnnnnnnnnnnnnnnnnnnnnnnnnnnnnnnnnnnnnnnnnnnnnnnnnnnnnnnnnnnnnnnnnnnnnnnnnnnnnnnnnnnnnnnnnnnnnnnnnnnnnnnnnnnnnnnnnnnnnnnnnnnnnnnnnnnnnnnnnnnnnnnnnnnnnnnnnnnnnnnnnnnnnnnnnnnnnnnnnnnnnnnnnnnnnnnnnnnnnnnnnnnnnnnnnnnnnnnnnnnnnnnnnnnnnnnnnnnnnnnnnnnnnnnnnnnnnnnnnnnnnnnnnnnnnnnnnnnnnnnnnnnnnnnnnnnnnnnnnnnnnnnnnnnnnnnnnnnnnnnnnnnnnnnnnnnnnnnnnnnnnnnnnnnnnnnnnnnnnnnnnnnnnnnnnnnnnnnnnnnnnnnnnnnnnnnnnnnnnnnnnnnnnnnnnnnnnnnnnnnnnnnnnnnnnnnnnnnnnnnnnnnnnnnnnnnnnnnnnnnnnnnnnnnnnnnnnnnnnnnnnnnnnnnnnnnnnnnnnnnnnnnnnnnnnnnnnnnnnnnnnnnnnnnnnnnnnnnnnnnnnnnnnnnnnnnnnnnnnnnnnnnnnnnnnnnnnnnnnnnnnnnnnnnnnnnnnnnnnnnnnnnnnnnnnnnnnnnnnnnnnnnnnnnnnnnnnnnnnnnnnnnnnnnnnnnnnnnnnnnnnnnnnnnnnnnnnnnnnnnnnnnnnnnnnnnnnnnnnnnnnnnnnnnnnnnnnnnnnnnnnnnnnnnnnnnnnnnnnnnnnnnnnnnnnnnnnnnnnnnnnnnnnnnnnnnnnnnnnnnnnnnnnnnnnnnnnnnnnnnnnnnnnnnnnnnnnnnnnnnnnnnnnnnnnnnnnnnnnnnnnnnnnnnnnnnnnnnnnnnnnnnnnnnnnnnnnnnnnnnnnnnnnnnnnnnnnnnnnnnnnnnnnnnnnnnnnnnnnnnnnnnnnnnnnnnnnnnnnnnnnnnnnnnnnnnnnnnnnnnnnnnnnnnnnnnnnnnnnnnnnnnnnnnnnnnnnnnnnnnnnnnnnnnnnnnnnnnnnnnnnnnnnnnnnnnnnnnnnnnnnnnnnnnnnnnnnnnnnnnnnnnnnnnnnnnnnnnnnnnnnnnnnnnnnnnnnnnnnnnnnnnnnnnnnnnnnnnnnnnnnnnnnnnnnnnnnnnnnnnnnnnnnnnnnnnnnnnnnnnnnnnnnnnnnnnnnnnnnnnnnnnnnnnnnnnnnnnnnnnnnnnnnnnnnnnnnnnnnnnnnnnnnnnnnnnnnnnnnnnnnnnnnnnnnnnnnnnnnnnnnnnnnnnnnnnnnnnnnnnnnnnnnnnnnnnnnnnnnnnnnnnnnnnnnnnnnnnnnnnnnnnnnnnnnnnnnnnnnnnnnnnnnnnnnnnnnnnnnnnnnnnnnnnnnnnnnnnnnnnnnnnnnnnnnnnnnnnnnnnnnnnnnnnnnnnnnnnnnnnnnnnnnnnnnnnnnnnnnnnnnnnnnnnnnnnnnnnnnnnnnnnnnnnnnnnnnnnnnnnnnnnnnnnnnnnnnnnnnnnnnnnnnnnnnnnnnnnnnnnnnnnnnnnnnnnnnnnnnnnnnnnnnnnnnnnnnnnnnnnnnnnnnnnnnnnnnnnnnnnnnnnnnnnnnnnnnnnnnnnnnnnnnnnnnnnnnnnnnnnnnnnnnnnnnnnnnnnnnnnnnnnnnnnnnnnnnnnnnnnnnnnnnnnnnnnnnnnnnnnnnnnnnnnnnnnnnnnnnnnnnnnnnnnnnnnnnnnnnnnnnnnnnnnnnnnnnnnnnnnnnnnnnnnnnnnnnnnnnnnnnnnnnnnnnnnnnnnnnnnnnnnnnnnnnnnnnnnnnnnnnnnnnnnnnnnnnnnnnnnnnnnnnnnnnnnnnnnnnnnnnnnnnnnnnnnnnnnnnnnnnnnnnnnnnnnnnnnnnnnnnnnnnnnnnnnnnnnnnnnnnnnnnnnnnnnnnnnnnnnnnnnnnnnnnnnnnnnnnnnnnnnnnnnnnnnnnnnnnnnnnnnnnnnnnnnnnnnnnnnnnnnnnnnnnnnnnnnnnnnnnnnnnnnnnnnnnnnnnnnnnnnnnnnnnnnnnnnnnnnnnnnnnnnnnnnnnnnnnnnnnnnnnnnnnnnnnnnnnnnnnnnnnnnnnnnnnnnnnnnnnnnnnnnnnnnnnnnnnnnnnnnnnnnnnnnnnnnnnnnnnnnnnnnnnnnnnnnnnnnnnnnnnnnnnnnnnnnnnnnnnnnnnnnnnnnnnnnnnnnnnnnnnnnnnnnnnnnnnnnnnnnnnnnnnnnnnnnnnnnnnnnnnnnnnnnnnnnnnnnnnnnnnnnnnnnnnnnnnnnnnnnnnnnnnnnnnnnnnnnnnnnnnnnnnnnnnnnnnnnnnnnnnnnnnnnnnnnnnnnnnnnnnnnnnnnnnnnnnnnnnnnnnnnnnnnnnnnnnnnnnnnnnnnnnnnnnnnnnnnnnnnnnnnnnnnnnnnnnnnnnnnnnnnnnnnnnnnnnnnnnnnnnnnnnnnnnnnnnnnnnnnnnnnnnnnnnnnnnnnnnnnnnnnnnnnnnnnnnnnnnnnnnnnnnnnnnnnnnnnnnnnnnnnnnnnnnnnnnnnnnnnnnnnnnnnnnnnnnnnnnnnnnnnnnnnnnnnnnnnnnnnnnnnnnnnnnnnnnnnnnnnnnnnnnnnnnnnnnnnnnnnnnnnnnnnnnnnnnnnnnnnnnnnnnnnnnnnnnnnnnnnnnnnnnnnnnnnnnnnnnnnnnnnnnnnnnnnnnnnnnnnnnnnnnnnnnnnnnnnnnnnnnnnnnnnnnnnnnnnnnnnnnnnnnnnnnnnnnnnnnnnnnnnnnnnnnnnnnnnnnnnnnnnnnnnnnnnnnnnnnnnnnnnnnnnnnnnnnnnnnnnnnnnnnnnnnnnnnnnnnnnnnnnnnnnnnnnnnnnnnnnnnnnnnnnnnnnnnnnnnnnnnnnnnnnnnnnnnnnnnnnnnnnnnnnnnnnnnnnnnnnnnnnnnnnnnnnnnnnnnnnnnnnnnnnnnnnnnnnnnnnnnnnnnnnnnnnnnnnnnnnnnnnnnnnnnnnnnnnnnnnnnnnnnnnnnnnnnnnnnnnnnnnnnnnnnnnnnnnnnnnnnnnnnnnnnnnnnnnnnnnnnnnnnnnnnnnnnnnnnnnnnnnnnnnnnnnnnnnnnnnnnnnnnnnnnnnnnnnnnnnnnnnnnnnnnnnnnnnnnnnnnnnnnnnnnnnnnnnnnnnnnnnnnnnnnnnnnnnnnnnnnnnnnnnnnnnnnnnnnnnnnnnnnnnnnnnnnnnnnnnnnnnnnnnnnnnnnnnnnnnnnnnnnnnnnnnnnnnnnnnnnnnnnnnnnnnnnnnnnnnnnnnnnnnnnnnnnnnnnnnnnnnnnnnnnnnnnnnnnnnnnnnnnnnnnnnnnnnnnnnnnnnnnnnnnnnnnnnnnnnnnnnnnnnnnnnnnnnnnnnnnnnnnnnnnnnnnnnnnnnnnnnnnnnnnnnnnnnnnnnnnnnnnnnnnnnnnnnnnnnnnnnnnnnnnnnnnnnnnnnnnnnnnnnnnnnnnnnnnnnnnnnnnnnnnnnnnnnnnnnnnnnnnnnnnnnnnnnnnnnnnnnnnnnnnnnnnnnnnnnnnnnnnnnnnnnnnnnnnnnnnnnnnnnnnnnnnnnnnnnnnnnnnnnnnnnnnnnnnnnnnnnnnnnnnnnnnnnnnnnnnnnnnnnnnnnnnnnnnnnnnnnnnnnnnnnnnnnnnnnnnnnnnnnnnnnnnnnnnnnnnnnnnnnnnnnnnnnnnnnnnnnnnnnnnnnnnnnnnnnnnnnnnnnnnnnnnnnnnnnnnnnnnnnnnnnnnnnnnnnnnnnnnnnnnnnnnnnnnnnnnnnnnnnnnnnnnnnnnnnnnnnnnnnnnnnnnnnnnnnnnnnnnnnnnnnnnnnnnnnnnnnnnnnnnnnnnnnnnnnnnnnnnnnnnnnnnnnnnnnnnnnnnnnnnnnnnnnnnnnnnnnnnnnnnnnnnnnnnnnnnnnnnnnnnnnnnnnnnnnnnnnnnnnnnnnnnnnnnnnnnnnnnnnnnnnnnnnnnnnnnnnnnnnnnnnnnnnnnnnnnnnnnnnnnnnnnnnnnnnnnnnnnnnnnnnnnnnnnnnnnnnnnnnnnnnnnnnnnnnnnnnnnnnnnnnnnnnnnnnnnnnnnnnnnnnnnnnnnnnnnnnnnnnnnnnnnnnnnnnnnnnnnnnnnnnnnnnnnnnnnnnnnnnnnnnnnnnnnnnnnnnnnnnnnnnnnnnnnnnnnnnnnnnnnnnnnnnnnnnnnnnnnnnnnnnnnnnnnnnnnnnnnnnnnnnnnnnnnnnnnnnnnnnnnnnnnnnnnnnnnnnnnnnnnnnnnnnnnnnnnnnnnnnnnnnnnnnnnnnnnnnnnnnnnnnnnnnnnnnnnnnnnnnnnnnnnnnnnnnnnnnnnnnnnnnnnnnnnnnnnnnnnnnnnnnnnnnnnnnnnnnnnnnnnnnnnnnnnnnnnnnnnnnnnnnnnnnnnnnnnnnnnnnnnnnnnnnnnnnnnnnnnnnnnnnnnnnnnnnnnnnnnnnnnnnnnnnnnnnnnnnnnnnnnnnnnnnnnnnnnnnnnnnnnnnnnnnnnnnnnnnnnnnnnnnnnnnnnnnnnnnnnnnnnnnnnnnnnnnnnnnnnnnnnnnnnnnnnnnnnnnnnnnnnnnnnnnnnnnnnnnnnnnnnnnnnnnnnnnnnnnnnnnnnnnnnnnnnnnnnnnnnnnnnnnnnnnnnnnnnnnnnnnnnnnnnnnnnnnnnnnnnnnnnnnnnnnnnnnnnnnnnnnnnnnnnnnnnnnnnnnnnnnnnnnnnnnnnnnnnnnnnnnnnnnnnnnnnnnnnnnnnnnnnnnnnnnnnnnnnnnnnnnnnnnnnnnnnnnnnnnnnnnnnnnnnnnnnnnnnnnnnnnnnnnnnnnnnnnnnnnnnnnnnnnnnnnnnnnnnnnnnnnnnnnnnnnnnnnnnnnnnnnnnnnnnnnnnnnnnnnnnnnnnnnnnnnnnnnnnnnnnnnnnnnnnnnnnnnnnnnnnnnnnnnnnnnnnnnnnnnnnnnnnnnnnnnnnnnnnnnnnnnnnnnnnnnnnnnnnnnnnnnnnnnnnnnnnnnnnnnnnnnnnnnnnnnnnnnnnnnnnnnnnnnnnnnnnnnnnnnnnnnnnnnnnnnnnnnnnnnnnnnnnnnnnnnnnnnnnnnnnnnnnnnnnnnnnnnnnnnnnnnnnnnnnnnnnnnnnnnnnnnnnnnnnnnnnnnnnnnnnnnnnnnnnnnnnnnnnnnnnnnnnnnnnnnnnnnnnnnnnnnnnnnnnnnnnnnnnnnnnnnnnnnnnnnnnnnnnnnnnnnnnnnnnnnnnnnnnnnnnnnnnnnnnnnnnnnnnnnnnnnnnnnnnnnnnnnnnnnnnnnnnnnnnnnnnnnnnnnnnnnnnnnnnnnnnnnnnnnnnnnnnnnnnnnnnnnnnnnnnnnnnnnnnnnnnnnnnnnnnnnnnnnnnnnnnnnnnnnnnnnnnnnnnnnnnnnnnnnnnnnnnnnnnnnnnnnnnnnnnnnnnnnnnnnnnnnnnnnnnnnnnnnnnnnnnnnnnnnnnnnnnnnnnnnnnnnnnnnnnnnnnnnnnnnnnnnnnnnnnnnnnnnnnnnnnnnnnnnnnnnnnnnnnnnnnnnnnnnnnnnnnnnnnnnnnnnnnnnnnnnnnnnnnnnnnnnnnnnnnnnnnnnnnnnnnnnnnnnnnnnnnnnnnnnnnnnnnnnnnnnnnnnnnnnnnnnnnnnnnnnnnnnnnnnnnnnnnnnnnnnnnnnnnnnnnnnnnnnnnnnnnnnnnnnnnnnnnnnnnnnnnnnnnnnnnnnnnnnnnnnnnnnnnnnnnnnnnnnnnnnnnnnnnnnnnnnnnnnnnnnnnnnnnnnnnnnnnnnnnnnnnnnnnnnnnnnnnnnnnnnnnnnnnnnnnnnnnnnnnnnnnnnnnnnnnnnnnnnnnnnnnnnnnnnnnnnnnnnnnnnnnnnnnnnnnnnnnnnnnnnnnnnnnnnnnnnnnnnnnnnnnnnnnnnnnnnnnnnnnnnnnnnnnnnnnnnnnnnnnnnnnnnnnnnnnnnnnnnnnnnnnnnnnnnnnnnnnnnnnnnnnnnnnnnnnnnnnnnnnnnnnnnnnnnnnnnnnnnnnnnnnnnnnnnnnnnnnnnnnnnnnnnnnnnnnnnnnnnnnnnnnnnnnnnnnnnnnnnnnnnnnnnnnnnnnnnnnnnnnnnnnnnnnnnnnnnnnnnnnnnnnnnnnnnnnnnnnnnnnnnnnnnnnnnnnnnnnnnnnnnnnnnnnnnnnnnnnnnnnnnnnnnnnnnnnnnnnnnnnnnnnnnnnnnnnnnnnnnnnnnnnnnnnnnnnnnnnnnnnnnnnnnnnnnnnnnnnnnnnnnnnnnnnnnnnnnnnnnnnnnnnnnnnnnnnnnnnnnnnnnnnnnnnnnnnnnnnnnnnnnnnnnnnnnnnnnnnnnnnnnnnnnnnnnnnnnnnnnnnnnnnnnnnnnnnnnnnnnnnnnnnnnnnnnnnnnnnnnnnnnnnnnnnnnnnnnnnnnnnnnnnnnnnnnnnnnnnnnnnnnnnnnnnnnnnnnnnnnnnnnnnnnnnnnnnnnnnnnnnnnnnnnnnnnnnnnnnnnnnnnnnnnnnnnnnnnnnnnnnnnnnnnnnnnnnnnnnnnnnnnnnnnnnnnnnnnnnnnnnnnnnnnnnnnnnnnnnnnnnnnnnnnnnnnnnnnnnnnnnnnnnnnnnnnnnnnnnnnnnnnnnnnnnnnnnnnnnnnnnnnnnnnnnnnnnnnnnnnnnnnnnnnnnnnnnnnnnnnnnnnnnnnnnnnnnnnnnnnnnnnnnnnnnnnnnnnnnnnnnnnnnnnnnnnnnnnnnnnnnnnnnnnnnnnnnnnnnnnnnnnnnnnnnnnnnnnnnnnnnnnnnnnnnnnnnnnnnnnnnnnnnnnnnnnnnnnnnnnnnnnnnnnnnnnnnnnnnnnnnnnnnnnnnnnnnnnnnnnnnnnnnnnnnnnnnnnnnnnnnnnnnnnnnnnnnnnnnnnnnnnnnnnnnnnnnnnnnnnnnnnnnnnnnnnnnnnnnnnnnnnnnnnnnnnnnnnnnnnnnnnnnnnnnnnnnnnnnnnnnnnnnnnnnnnnnnnnnnnnnnnnnnnnnnnnnnnnnnnnnnnnnnnnnnnnnnnnnnnnnnnnnnnnnnnnnnnnnnnnnnnnnnnnnnnnnnnnnnnnnnnnnnnnnnnnnnnnnnnnnnnnnnnnnnnnnnnnnnnnnnnnnnnnnnnnnnnnnnnnnnnnnnnnnnnnnnnnnnnnnnnnnnnnnnnnnnnnnnnnnnnnnnnnnnnnnnnnnnnnnnnnnnnnnnnnnnnnnnnnnnnnnnnnnnnnnnnnnnnnnnnnnnnnnnnnnnnnnnnnnnnnnnnnnnnnnnnnnnnnnnnnnnnnnnnnnnnnnnnnnnnnnnnnnnnnnnnnnnnnnnnnnnnnnnnnnnnnnnnnnnnnnnnnnnnnnnnnnnnnnnnnnnnnnnnnnnnnnnnnnnnnnnnnnnnnnnnnnnnnnnnnnnnnnnnnnnnnnnnnnnnnnnnnnnnnnnnnnnnnnnnnnnnnnnnnnnnnnnnnnnnnnnnnnnnnnnnnnnnnnnnnnnnnnnnnnnnnnnnnnnnnnnnnnnnnnnnnnnnnnnnnnnnnnnnnnnnnnnnnnnnnnnnnnnnnnnnnnnnnnnnnnnnnnnnnnnnnnnnnnnnnnnnnnnnnnnnnnnnnnnnnnnnnnnnnnnnnnnnnnnnnnnnnnnnnnnnnnnnnnnnnnnnnnnnnnnnnnnnnnnnnnnnnnnnnnnnnnnnnnnnnnnnnnnnnnnnnnnnnnnnnnnnnnnnnnnnnnnnnnnnnnnnnnnnnnnnnnnnnnnnnnnnnnnnnnnnnnnnnnnnnnnnnnnnnnnnnnnnnnnnnnnnnnnnnnnnnnnnnnnnnnnnnnnnnnnnnnnnnnnnnnnnnnnnnnnnnnnnnnnnnnnnnnnnnnnnnnnnnnnnnnnnnnnnnnnnnnnnnnnnnnnnnnnnnnnnnnnnnnnnnnnnnnnnnnnnnnnnnnnnnnnnnnnnnnnnnnnnnnnnnnnnnnnnnnnnnnnnnnnnnnnnnnnnnnnnnnnnnnnnnnnnnnnnnnnnnnnnnnnnnnnnnnnnnnnnnnnnnnnnnnnnnnnnnnnnnnnnnnnnnnnnnnnnnnnnnnnnnnnnnnnnnnnnnnnnnnnnnnnnnnnnnnnnnnnnnnnnnnnnnnnnnnnnnnnnnnnnnnnnnnnnnnnnnnnnnnnnnnnnnnnnnnnnnnnnnnnnnnnnnnnnnnnnnnnnnnnnnnnnnnnnnnnnnnnnnnnnnnnnnnnnnnnnnnnnnnnnnnnnnnnnnnnnnnnnnnnnnnnnnnnnnnnnnnnnnnnnnnnnnnnnnnnnnnnnnnnnnnnnnnnnnnnnnnnnnnnnnnnnnnnnnnnnnnnnnnnnnnnnnnnnnnnnnnnnnnnnnnnnnnnnnnnnnnnnnnnnnnnnnnnnnnnnnnnnnnnnnnnnnnnnnnnnnnnnnnnnnnnnnnnnnnnnnnnnnnnnnnnnnnnnnnnnnnnnnnnnnnnnnnnnnnnnnnnnnnnnnnnnnnnnnnnnnnnnnnnnnnnnnnnnnnnnnnnnnnnnnnnnnnnnnnnnnnnnnnnnnnnnnnnnnnnnnnnnnnnnnnnnnnnnnnnnnnnnnnnnnnnnnnnnnnnnnnnnnnnnnnnnnnnnnnnnnnnnnnnnnnnnnnnnnnnnnnnnnnnnnnnnnnnnnnnnnnnnnnnnnnnnnnnnnnnnnnnnnnnnnnnnnnnnnnnnnnnnnnnnnnnnnnnnnnnnnnnnnnnnnnnnnnnnnnnnnnnnnnnnnnnnnnnnnnnnnnnnnnnnnnnnnnnnnnnnnnnnnnnnnnnnnnnnnnnnnnnnnnnnnnnnnnnnnnnnnnnnnnnnnnnnnnnnnnnnnnnnnnnnnnnnnnnnnnnnnnnnnnnnnnnnnnnnnnnnnnnnnnnnnnnnnnnnnnnnnnnnnnnnnnnnnnnnnnnnnnnnnnnnnnnnnnnnnnnnnnnnnnnnnnnnnnnnnnnnnnnnnnnnnnnnnnnnnnnnnnnnnnnnnnnnnnnnnnnnnnnnnnnnnnnnnnnnnnnnnnnnnnnnnnnnnnnnnnnnnnnnnnnnnnnnnnnnnnnnnnnnnnnnnnnnnnnnnnnnnnnnnnnnnnnnnnnnnnnnnnnnnnnnnnnnnnnnnnnnnnnnnnnnnnnnnnnnnnnnnnnnnnnnnnnnnnnnnnnnnnnnnnnnnnnnnnnnnnnnnnnnnnnnnnnnnnnnnnnnnnnnnnnnnnnnnnnnnnnnnnnnnnnnnnnnnnnnnnnnnnnnnnnnnnnnnnnnnnnnnnnnnnnnnnnnnnnnnnnnnnnnnnnnnnnnnnnnnnnnnnnnnnnnnnnnnnnnnnnnnnnnnnnnnnnnnnnnnnnnnnnnnnnnnnnnnnnnnnnnnnnnnnnnnnnnnnnnnnnnnnnnnnnnnnnnnnnnnnnnnnnnnnnnnnnnnnnnnnnnnnnnnnnnnnnnnnnnnnnnnnnnnnnnnnnnnnnnnnnnnnnnnnnnnnnnnnnnnnnnnnnnnnnnnnnnnnnnnnnnnnnnnnnnnnnnnnnnnnnnnnnnnnnnnnnnnnnnnnnnnnnnnnnnnnnnnnnnnnnnnnnnnnnnnnnnnnnnnnnnnnnnnnnnnnnnnnnnnnnnnnnnnnnnnnnnnnnnnnnnnnnnnnnnnnnnnnnnnnnnnnnnnnnnnnnnnnnnnnnnnnnnnnnnnnnnnnnnnnnnnnnnnnnnnnnnnnnnnnnnnnnnnnnnnnnnnnnnnnnnnnnnnnnnnnnnnnnnnnnnnnnnnnnnnnnnnnnnnnnnnnnnnnnnnnnnnnnnnnnnnnnnnnnnnnnnnnnnnnnnnnnnnnnnnnnnnnnnnnnnnnnnnnnnnnnnnnnnnnnnnnnnnnnnnnnnnnnnnnnnnnnnnnnnnnnnnnnnnnnnnnnnnnnnnnnnnnnnnnnnnnnnnnnnnnnnnnnnnnnnnnnnnnnnnnnnnnnnnnnnnnnnnnnnnnnnnnnnnnnnnnnnnnnnnnnnnnnnnnnnnnnnnnnnnnnnnnnnnnnnnnnnnnnnnnnnnnnnnnnnnnnnnnnnnnnnnnnnnnnnnnnnnnnnnnnnnnnnnnnnnnnnnnnnnnnnnnnnnnnnnnnnnnnnnnnnnnnnnnnnnnnnnnnnnnnnnnnnnnnnnnnnnnnnnnnnnnnnnnnnnnnnnnnnnnnnnnnnnnnnnnnnnnnnnnnnnnnnnnnnnnnnnnnnnnnnnnnnnnnnnnnnnnnnnnnnnnnnnnnnnnnnnnnnnnnnnnnnnnnnnnnnnnnnnnnnnnnnnnnnnnnnnnnnnnnnnnnnnnnnnnnnnnnnnnnnnnnnnnnnnnnnnnnnnnnnnnnnnnnnnnnnnnnnnnnnnnnnnnnnnnnnnnnnnnnnnnnnnnnnnnnnnnnnnnnnnnnnnnnnnnnnnnnnnnnnnnnnnnnnnnnnnnnnnnnnnnnnnnnnnnnnnnnnnnnnnnnnnnnnnnnnnnnnnnnnnnnnnnnnnnnnnnnnnnnnnnnnnnnnnnnnnnnnnnnnnnnnnnnnnnnnnnnnnnnnnnnnnnnnnnnnnnnnnnnnnnnnnnnnnnnnnnnnnnnnnnnnnnnnnnnnnnnnnnnnnnnnnnnnnnnnnnnnnnnnnnnnnnnnnnnnnnnnnnnnnnnnnnnnnnnnnnnnnnnnnnnnnnnnnnnnnnnnnnnnnnnnnnnnnnnnnnnnnnnnnnnnnnnnnnnnnnnnnnnnnnnnnnnnnnnnnnnnnnnnnnnnnnnnnnnnnnnnnnnnnnnnnnnnnnnnnnnnnnnnnnnnnnnnnnnnnnnnnnnnnnnnnnnnnnnnnnnnnnnnnnnnnnnnnnnnnnnnnnnnnnnnnnnnnnnnnnnnnnnnnnnnnnnnnnnnnnnnnnnnnnnnnnnnnnnnnnnnnnnnnnnnnnnnnnnnnnnnnnnnnnnnnnnnnnnnnnnnnnnnnnnnnnnnnnnnnnnnnnnnnnnnnnnnnnnnnnnnnnnnnnnnnnnnnnnnnnnnnnnnnnnnnnnnnnnnnnnnnnnnnnnnnnnnnnnnnnnnnnnnnnnnnnnnnnnnnnnnnnnnnnnnnnnnnnnnnnnnnnnnnnnnnnnnnnnnnnnnnnnnnnnnnnnnnnnnnnnnnnnnnnnnnnnnnnnnnnnnnnnnnnnnnnnnnnnnnnnnnnnnnnnnnnnnnnnnnnnnnnnnnnnnnnnnnnnnnnnnnnnnnnnnnnnnnnnnnnnnnnnnnnnnnnnnnnnnnnnnnnnnnnnnnnnnnnnnnnnnnnnnnnnnnnnnnnnnnnnnnnnnnnnnnnnnnnnnnnnnnnnnnnnnnnnnnnnnnnnnnnnnnnnnnnnnnnnnnnnnnnnnnnnnnnnnnnnnnnnnnnnnnnnnnnnnnnnnnnnnnnnnnnnnnnnnnnnnnnnnnnnnnnnnnnnnnnnnnnnnnnnnnnnnnnnnnnnnnnnnnnnnnnnnnnnnnnnnnnnnnnnnnnnnnnnnnnnnnnnnnnnnnnnnnnnnnnnnnnnnnnnnnnnnnnnnnnnnnnnnnnnnnnnnnnnnnnnnnnnnnnnnnnnnnnnnnnnnnnnnnnnnnnnnnnnnnnnnnnnnnnnnnnnnnnnnnnnnnnnnnnnnnnnnnnnnnnnnnnnnnnnnnnnnnnnnnnnnnnnnnnnnnnnnnnnnnnnnnnnnnnnnnnnnnnnnnnnnnnnnnnnnnnnnnnnnnnnnnnnnnnnnnnnnnnnnnnnnnnnnnnnnnnnnnnnnnnnnnnnnnnnnnnnnnnnnnnnnnnnnnnnnnnnnnnnnnnnnnnnnnnnnnnnnnnnnnnnnnnnnnnnnnnnnnnnnnnnnnnnnnnnnnnnnnnnnnnnnnnnnnnnnnnnnnnnnnnnnnnnnnnnnnnnnnnnnnnnnnnnnnnnnnnnnnnnnnnnnnnnnnnnnnnnnnnnnnnnnnnnnnnnnnnnnnnnnnnnnnnnnnnnnnnnnnnnnnnnnnnnnnnnnnnnnnnnnnnnnnnnnnnnnnnnnnnnnnnnnnnnnnnnnnnnnnnnnnnnnnnnnnnnnnnnnnnnnnnnnnnnnnnnnnnnnnnnnnnnnnnnnnnnnnnnnnnnnnnnnnnnnnnnnnnnnnnnnnnnnnnnnnnnnnnnnnnnnnnnnnnnnnnnnnnnnnnnnnnnnnnnnnnnnnnnnnnnnnnnnnnnnnnnnnnnnnnnnnnnnnnnnnnnnnnnnnnnnnnnnnnnnnnnnnnnnnnnnnnnnnnnnnnnnnnnnnnnnnnnnnnnnnnnnnnnnnnnnnnnnnnnnnnnnnnnnnnnnnnnnnnnnnnnnnnnnnnnnnnnnnnnnnnnnnnnnnnnnnnnnnnnnnnnnnnnnnnnnnnnnnnnnnnnnnnnnnnnnnnnnnnnnnnnnnnnnnnnnnnnnnnnnnnnnnnnnnnnnnnnnnnnnnnnnnnnnnnnnnnnnnnnnnnnnnnnnnnnnnnnnnnnnnnnnnnnnnnnnnnnnnnnnnnnnnnnnnnnnnnnnnnnnnnnnnnnnnnnnnnnnnnnnnnnnnnnnnnnnnnnnnnnnnnnnnnnnnnnnnnnnnnnnnnnnnnnnnnnnnnnnnnnnnnnnnnnnnnnnnnnnnnnnnnnnnnnnnnnnnnnnnnnnnnnnnnnnnnnnnnnnnnnnnnnnnnnnnnnnnnnnnnnnnnnnnnnnnnnnnnnnnnnnnnnnnnnnnnnnnnnnnnnnnnnnnnnnnnnnnnnnnnnnnnnnnnnnnnnnnnnnnnnnnnnnnnnnnnnnnnnnnnnnnnnnnnnnnnnnnnnnnnnnnnnnnnnnnnnnnnnnnnnnnnnnnnnnnnnnnnnnnnnnnnnnnnnnnnnnnnnnnnnnnnnnnnnnnnnnnnnnnnnnnnnnnnnnnnnnnnnnnnnnnnnnnnnnnnnnnnnnnnnnnnnnnnnnnnnnnnnnnnnnnnnnnnnnnnnnnnnnnnnnnnnnnnnnnnnnnnnnnnnnnnnnnnnnnnnnnnnnnnnnnnnnnnnnnnnnnnnnnnnnnnnnnnnnnnnnnnnnnnnnnnnnnnnnnnnnnnnnnnnnnnnnnnnnnnnnnnnnnnnnnnnnnnnnnnnnnnnnnnnnnnnnnnnnnnnnnnnnnnnnnnnnnnnnnnnnnnnnnnnnnnnnnnnnnnnnnnnnnnnnnnnnnnnnnnnnnnnnnnnnnnnnnnnnnnnnnnnnnnnnnnnnnnnnnnnnnnnnnnnnnnnnnnnnnnnnnnnnnnnnnnnnnnnnnnnnnnnnnnnnnnnnnnnnnnnnnnnnnnnnnnnnnnnnnnnnnnnnnnnnnnnnnnnnnnnnnnnnnnnnnnnnnnnnnnnnnnnnnnnnnnnnnnnnnnnnnnnnnnnnnnnnnnnnnnnnnnnnnnnnnnnnnnnnnnnnnnnnnnnnnnnnnnnnnnnnnnnnnnnnnnnnnnnnnnnnnnnnnnnnnnnnnnnnnnnnnnnnnnnnnnnnnnnnnnnnnnnnnnnnnnnnnnnnnnnnnnnnnnnnnnnnnnnnnnnnnnnnnnnnnnnnnnnnnnnnnnnnnnnnnnnnnnnnnnnnnnnnnnnnnnnnnnnnnnnnnnnnnnnnnnnnnnnnnnnnnnnnnnnnnnnnnnnnnnnnnnnnnnnnnnnnnnnnnnnnnnnnnnnnnnnnnnnnnnnnnnnnnnnnnnnnnnnnnnnnnnnnnnnnnnnnnnnnnnnnnnnnnnnnnnnnnnnnnnnnnnnnnnnnnnnnnnnnnnnnnnnnnnnnnnnnnnnnnnnnnnnnnnnnnnnnnnnnnnnnnnnnnnnnnnnnnnnnnnnnnnnnnnnnnnnnnnnnnnnnnnnnnnnnnnnnnnnnnnnnnnnnnnnnnnnnnnnnnnnnnnnnnnnnnnnnnnnnnnnnnnnnnnnnnnnnnnnnnnnnnnnnnnnnnnnnnnnnnnnnnnnnnnnnnnnnnnnnnnnnnnnnnnnnnnnnnnnnnnnnnnnnnnnnnnnnnnnnnnnnnnnnnnnnnnnnnnnnnnnnnnnnnnnnnnnnnnnnnnnnnnnnnnnnnnnnnnnnnnnnnnnnnnnnnnnnnnnnnnnnnnnnnnnnnnnnnnnnnnnnnnnnnnnnnnnnnnnnnnnnnnnnnnnnnnnnnnnnnnnnnnnnnnnnnnnnnnnnnnnnnnnnnnnnnnnnnnnnnnnnnnnnnnnnnnnnnnnnnnnnnnnnnnnnnnnnnnnnnnnnnnnnnnnnnnnnnnnnnnnnnnnnnnnnnnnnnnnnnnnnnnnnnnnnnnnnnnnnnnnnnnnnnnnnnnnnnnnnnnnnnnnnnnnnnnnnnnnnnnnnnnnnnnnnnnnnnnnnnnnnnnnnnnnnnnnnnnnnnnnnnnnnnnnnnnnnnnnnnnnnnnnnnnnnnnnnnnnnnnnnnnnnnnnnnnnnnnnnnnnnnnnnnnnnnnnnnnnnnnnnnnnnnnnnnnnnnnnnnnnnnnnnnnnnnnnnnnnnnnnnnnnnnnnnnnnnnnnnnnnnnnnnnnnnnnnnnnnnnnnnnnnnnnnnnnnnnnnnnnnnnnnnnnnnnnnnnnnnnnnnnnnnnnnnnnnnnnnnnnnnnnnnnnnnnnnnnnnnnnnnnnnnnnnnnnnnnnnnnnnnnnnnnnnnnnnnnnnnnnnnnnnnnnnnnnnnnnnnnnnnnnnnnnnnnnnnnnnnnnnnnnnnnnnnnnnnnnnnnnnnnnnnnnnnnnnnnnnnnnnnnnnnnnnnnnnnnnnnnnnnnnnnnnnnnnnnnnnnnnnnnnnnnnnnnnnnnnnnnnnnnnnnnnnnnnnnnnnnnnnnnnnnnnnnnnnnnnnnnnnnnnnnnnnnnnnnnnnnnnnnnnnnnnnnnnnnnnnnnnnnnnnnnnnnnnnnnnnnnnnnnnnnnnnnnnnnnnnnnnnnnnnnnnnnnnnnnnnnnnnnnnnnnnnnnnnnnnnnnnnnnnnnnnnnnnnnnnnnnnnnnnnnnnnnnnnnnnnnnnnnnnnnnnnnnnnnnnnnnnnnnnnnnnnnnnnnnnnnnnnnnnnnnnnnnnnnnnnnnnnnnnnnnnnnnnnnnnnnnnnnnnnnnnnnnnnnnnnnnnnnnnnnnnnnnnnnnnnnnnnnnnnnnnnnnnnnnnnnnnnnnnnnnnnnnnnnnnnnnnnnnnnnnnnnnnnnnnnnnnnnnnnnnnnnnnnnnnnnnnnnnnnnnnnnnnnnnnnnnnnnnnnnnnnnnnnnnnnnnnnnnnnnnnnnnnnnnnnnnnnnnnnnnnnnnnnnnnnnnnnnnnnnnnnnnnnnnnnnnnnnnnnnnnnnnnnnnnnnnnnnnnnnnnnnnnnnnnnnnnnnnnnnnnnnnnnnnnnnnnnnnnnnnnnnnnnnnnnnnnnnnnnnnnnnnnnnnnnnnnnnnnnnnnnnnnnnnnnnnnnnnnnnnnnnnnnnnnnnnnnnnnnnnnnnnnnnnnnnnnnnnnnnnnnnnnnnnnnnnnnnnnnnnnnnnnnnnnnnnnnnnnnnnnnnnnnnnnnnnnnnnnnnnnnnnnnnnnnnnnnnnnnnnnnnnnnnnnnnnnnnnnnnnnnnnnnnnnnnnnnnnnnnnnnnnnnnnnnnnnnnnnnnnnnnnnnnnnnnnnnnnnnnnnnnnnnnnnnnnnnnnnnnnnnnnnnnnnnnnnnnnnnnnnnnnnnnnnnnnnnnnnnnnnnnnnnnnnnnnnnnnnnnnnnnnnnnnnnnnnnnnnnnnnnnnnnnnnnnnnnnnnnnnnnnnnnnnnnnnnnnnnnnnnnnnnnnnnnnnnnnnnnnnnnnnnnnnnnnnnnnnnnnnnnnnnnnnnnnnnnnnnnnnnnnnnnnnnnnnnnnnnnnnnnnnnnnnnnnnnnnnnnnnnnnnnnnnnnnnnnnnnnnnnnnnnnnnnnnnnnnnnnnnnnnnnnnnnnnnnnnnnnnnnnnnnnnnnnnnnnnnnnnnnnnnnnnnnnnnnnnnnnnnnnnnnnnnnnnnnnnnnnnnnnnnnnnnnnnnnnnnnnnnnnnnnnnnnnnnnnnnnnnnnnnnnnnnnnnnnnnnnnnnnnnnnnnnnnnnnnnnnnnnnnnnnnnnnnnnnnnnnnnnnnnnnnnnnnnnnnnnnnnnnnnnnnnnnnnnnnnnnnnnnnnnnnnnnnnnnnnnnnnnnnnnnnnnnnnnnnnnnnnnnnnnnnnnnnnnnnnnnnnnnnnnnnnnnnnnnnnnnnnnnnnnnnnnnnnnnnnnnnnnnnnnnnnnnnnnnnnnnnnnnnnnnnnnnnnnnnnnnnnnnnnnnnnnnnnnnnnnnnnnnnnnnnnnnnnnnnnnnnnnnnnnnnnnnnnnnnnnnnnnnnnnnnnnnnnnnnnnnnnnnnnnnnnnnnnnnnnnnnnnnnnnnnnnnnnnnnnnnnnnnnnnnnnnnnnnnnnnnnnnnnnnnnnnnnnnnnnnnnnnnnnnnnnnnnnnnnnnnnnnnnnnnnnnnnnnnnnnnnnnnnnnnnnnnnnnnnnnnnnnnnnnnnnnnnnnnnnnnnnnnnnnnnnnnnnnnnnnnnnnnnnnnnnnnnnnnnnnnnnnnnnnnnnnnnnnnnnnnnnnnnnnnnnnnnnnnnnnnnnnnnnnnnnnnnnnnnnnnnnnnnnnnnnnnnnnnnnnnnnnnnnnnnnnnnnnnnnnnnnnnnnnnnnnnnnnnnnnnnnnnnnnnnnnnnnnnnnnnnnnnnnnnnnnnnnnnnnnnnnnnnnnnnnnnnnnnnnnnnnnnnnnnnnnnnnnnnnnnnnnnnnnnnnnnnnnnnnnnnnnnnnnnnnnnnnnnnnnnnnnnnnnnnnnnnnnnnnnnnnnnnnnnnnnnnnnnnnnnnnnnnnnnnnnnnnnnnnnnnnnnnnnnnnnnnnnnnnnnnnnnnnnnnnnnnnnnnnnnnnnnnnnnnnnnnnnnnnnnnnnnnnnnnnnnnnnnnnnnnnnnnnnnnnnnnnnnnnnnnnnnnnnnnnnnnnnnnnnnnnnnnnnnnnnnnnnnnnnnnnnnnnnnnnnnnnnnnnnnnnnnnnnnnnnnnnnnnnnnnnnnnnnnnnnnnnnnnnnnnnnnnnnnnnnnnnnnnnnnnnnnnnnnnnnnnnnnnnnnnnnnnnnnnnnnnnnnnnnnnnnnnnnnnnnnnnnnnnnnnnnnnnnnnnnnnnnnnnnnnnnnnnnnnnnnnnnnnnnnnnnnnnnnnnnnnnnnnnnnnnnnnnnnnnnnnnnnnnnnnnnnnnnnnnnnnnnnnnnnnnnnnnnnnnnnnnnnnnnnnnnnnnnnnnnnnnnnnnnnnnnnnnnnnnnnnnnnnnnnnnnnnnnnnnnnnnnnnnnnnnnnnnnnnnnnnnnnnnnnnnnnnnnnnnnnnnnnnnnnnnnnnnnnnnnnnnnnnnnnnnnnnnnnnnnnnnnnnnnnnnnnnnnnnnnnnnnnnnnnnnnnnnnnnnnnnnnnnnnnnnnnnnnnnnnnnnnnnnnnnnnnnnnnnnnnnnnnnnnnnnnnnnnnnnnnnnnnnnnnnnnnnnnnnnnnnnnnnnnnnnnnnnnnnnnnnnnnnnnnnnnnnnnnnnnnnnnnnnnnnnnnnnnnnnnnnnnnnnnnnnnnnnnnnnnnnnnnnnnnnnnnnnnnnnnnnnnnnnnnnnnnnnnnnnnnnnnnnnnnnnnnnnnnnnnnnnnnnnnnnnnnnnnnnnnnnnnnnnnnnnnnnnnnnnnnnnnnnnnnnnnnnnnnnnnnnnnnnnnnnnnnnnnnnnnnnnnnnnnnnnnnnnnnnnnnnnnnnnnnnnnnnnnnnnnnnnnnnnnnnnnnnnnnnnnnnnnnnnnnnnnnnnnnnnnnnnnnnnnnnnnnnnnnnnnnnnnnnnnnnnnnnnnnnnnnnnnnnnnnnnnnnnnnnnnnnnnnnnnnnnnnnnnnnnnnnnnnnnnnnnnnnnnnnnnnnnnnnnnnnnnnnnnnnnnnnnnnnnnnnnnnnnnnnnnnnnnnnnnnnnnnnnnnnnnnnnnnnnnnnnnnnnnnnnnnnnnnnnnnnnnnnnnnnnnnnnnnnnnnnnnnnnnnnnnnnnnnnnnnnnnnnnnnnnnnnnnnnnnnnnnnnnnnnnnnnnnnnnnnnnnnnnnnnnnnnnnnnnnnnnnnnnnnnnnnnnnnnnnnnnnnnnnnnnnnnnnnnnnnnnnnnnnnnnnnnnnnnnnnnnnnnnnnnnnnnnnnnnnnnnnnnnnnnnnnnnnnnnnnnnnnnnnnnnnnnnnnnnnnnnnnnnnnnnnnnnnnnnnnnnnnnnnnnnnnnnnnnnnnnnnnnnnnnnnnnnnnnnnnnnnnnnnnnnnnnnnnnnnnnnnnnnnnnnnnnnnnnnnnnnnnnnnnnnnnnnnnnnnnnnnnnnnnnnnnnnnnnnnnnnnnnnnnnnnnnnnnnnnnnnnnnnnnnnnnnnnnnnnnnnnnnnnnnnnnnnnnnnnnnnnnnnnnnnnnnnnnnnnnnnnnnnnnnnnnnnnnnnnnnnnnnnnnnnnnnnnnnnnnnnnnnnnnnnnnnnnnnnnnnnnnnnnnnnnnnnnnnnnnnnnnnnnnnnnnnnnnnnnnnnnnnnnnnnnnnnnnnnnnnnnnnnnnnnnnnnnnnnnnnnnnnnnnnnnnnnnnnnnnnnnnnnnnnnnnnnnnnnnnnnnnnnnnnnnnnnnnnnnnnnnnnnnnnnnnnnnnnnnnnnnnnnnnnnnnnnnnnnnnnnnnnnnnnnnnnnnnnnnnnnnnnnnnnnnnnnnnnnnnnnnnnnnnnnnnnnnnnnnnnnnnnnnnnnnnnnnnnnnnnnnnnnnnnnnnnnnnnnnnnnnnnnnnnnnnnnnnnnnnnnnnnnnnnnnnnnnnnnnnnnnnnnnnnnnnnnnnnnnnnnnnnnnnnnnnnnnnnnnnnnnnnnnnnnnnnnnnnnnnnnnnnnnnnnnnnnnnnnnnnnnnnnnnnnnnnnnnnnnnnnnnnnnnnnnnnnnnnnnnnnnnnnnnnnnnnnnnnnnnnnnnnnnnnnnnnnnnnnnnnnnnnnnnnnnnnnnnnnnnnnnnnnnnnnnnnnnnnnnnnnnnnnnnnnnnnnnnnnnnnnnnnnnnnnnnnnnnnnnnnnnnnnnnnnnnnnnnnnnnnnnnnnnnnnnnnnnnnnnnnnnnnnnnnnnnnnnnnnnnnnnnnnnnnnnnnnnnnnnnnnnnnnnnnnnnnnnnnnnnnnnnnnnnnnnnnnnnnnnnnnnnnnnnnnnnnnnnnnnnnnnnnnnnnnnnnnnnnnnnnnnnnnnnnnnnnnnnnnnnnnnnnnnnnnnnnnnnnnnnnnnnnnnnnnnnnnnnnnnnnnnnnnnnnnnnnnnnnnnnnnnnnnnnnnnnnnnnnnnnnnnnnnnnnnnnnnnnnnnnnnnnnnnnnnnnnnnnnnnnnnnnnnnnnnnnnnnnnnnnnnnnnnnnnnnnnnnnnnnnnnnnnnnnnnnnnnnnnnnnnnnnnnnnnnnnnnnnnnnnnnnnnnnnnnnnnnnnnnnnnnnnnnnnnnnnnnnnnnnnnnnnnnnnnnnnnnnnnnnnnnnnnnnnnnnnnnnnnnnnnnnnnnnnnnnnnnnnnnnnnnnnnnnnnnnnnnnnnnnnnnnnnnnnnnnnnnnnnnnnnnnnnnnnnnnnnnnnnnnnnnnnnnnnnnnnnnnnnnnnnnnnnnnnnnnnnnnnnnnnnnnnnnnnnnnnnnnnnnnnnnnnnnnnnnnnnnnnnnnnnnnnnnnnnnnnnnnnnnnnnnnnnnnnnnnnnnnnnnnnnnnnnnnnnnnnnnnnnnnnnnnnnnnnnnnnnnnnnnnnnnnnnnnnnnnnnnnnnnnnnnnnnnnnnnnnnnnnnnnnnnnnnnnnnnnnnnnnnnnnnnnnnnnnnnnnnnnnnnnnnnnnnnnnnnnnnnnnnnnnnnnnnnnnnnnnnnnnnnnnnnnnnnnnnnnnnnnnnnnnnnnnnnnnnnnnnnnnnnnnnnnnnnnnnnnnnnnnnnnnnnnnnnnnnnnnnnnnnnnnnnnnnnnnnnnnnnnnnnnnnnnnnnnnnnnnnnnnnnnnnnnnnnnnnnnnnnnnnnnnnnnnnnnnnnnnnnnnnnnnnnnnnnnnnnnnnnnnnnnnnnnnnnnnnnnnnnnnnnnnnnnnnnnnnnnnnnnnnnnnnnnnnnnnnnnnnnnnnnnnnnnnnnnnnnnnnnnnnnnnnnnnnnnnnnnnnnnnnnnnnnnnnnnnnnnnnnnnnnnnnnnnnnnnnnnnnnnnnnnnnnnnnnnnnnnnnnnnnnnnnnnnnnnnnnnnnnnnnnnnnnnnnnnnnnnnnnnnnnnnnnnnnnnnnnnnnnnnnnnnnnnnnnnnnnnnnnnnnnnnnnnnnnnnnnnnnnnnnnnnnnnnnnnnnnnnnnnnnnnnnnnnnnnnnnnnnnnnnnnnnnnnnnnnnnnnnnnnnnnnnnnnnnnnnnnnnnnnnnnnnnnnnnnnnnnnnnnnnnnnnnnnnnnnnnnnnnnnnnnnnnnnnnnnnnnnnnnnnnnnnnnnnnnnnnnnnnnnnnnnnnnnnnnnnnnnnnnnnnnnnnnnnnnnnnnnnnnnnnnnnnnnnnnnnnnnnnnnnnnnnnnnnnnnnnnnnnnnnnnnnnnnnnnnnnnnnnnnnnnnnnnnnnnnnnnnnnnnnnnnnnnnnnnnnnnnnnnnnnnnnnnnnnnnnnnnnnnnnnnnnnnnnnnnnnnnnnnnnnnnnnnnnnnnnnnnnnnnnnnnnnnnnnnnnnnnnnnnnnnnnnnnnnnnnnnnnnnnnnnnnnnnnnnnnnnnnnnnnnnnnnnnnnnnnnnnnnnnnnnnnnnnnnnnnnnnnnnnnnnnnnnnnnnnnnnnnnnnnnnnnnnnnnnnnnnnnnnnnnnnnnnnnnnnnnnnnnnnnnnnnnnnnnnnnnnnnnnnnnnnnnnnnnnnnnnnnnnnnnnnnnnnnnnnnnnnnnnnnnnnnnnnnnnnnnnnnnnnnnnnnnnnnnnnnnnnnnnnnnnnnnnnnnnnnnnnnnnnnnnnnnnnnnnnnnnnnnnnnnnnnnnnnnnnnnnnnnnnnnnnnnnnnnnnnnnnnnnnnnnnnnnnnnnnnnnnnnnnnnnnnnnnnnnnnnnnnnnnnnnnnnnnnnnnnnnnnnnnnnnnnnnnnnnnnnnnnnnnnnnnnnnnnnnnnnnnnnnnnnnnnnnnnnnnnnnnnnnnnnnnnnnnnnnnnnnnnnnnnnnnnnnnnnnnnnnnnnnnnnnnnnnnnnnnnnnnnnnnnnnnnnnnnnnnnnnnnnnnnnnnnnnnnnnnnnnnnnnnnnnnnnnnnnnnnnnnnnnnnnnnnnnnnnnnnnnnnnnnnnnnnnnnnnnnnnnnnnnnnnnnnnnnnnnnnnnnnnnnnnnnnnnnnnnnnnnnnnnnnnnnnnnnnnnnnnnnnnnnnnnnnnnnnnnnnnnnnnnnnnnnnnnnnnnnnnnnnnnnnnnnnnnnnnnnnnnnnnnnnnnnnnnnnnnnnnnnnnnnnnnnnnnnnnnnnnnnnnnnnnnnnnnnnnnnnnnnnnnnnnnnnnnnnnnnnnnnnnnnnnnnnnnnnnnnnnnnnnnnnnnnnnnnnnnnnnnnnnnnnnnnnnnnnnnnnnnnnnnnnnnnnnnnnnnnnnnnnnnnnnnnnnnnnnnnnnnnnnnnnnnnnnnnnnnnnnnnnnnnnnnnnnnnnnnnnnnnnnnnnnnnnnnnnnnnnnnnnnnnnnnnnnnnnnnnnnnnnnnnnnnnnnnnnnnnnnnnnnnnnnnnnnnnnnnnnnnnnnnnnnnnnnnnnnnnnnnnnnnnnnnnnnnnnnnnnnnnnnnnnnnnnnnnnnnnnnnnnnnnnnnnnnnnnnnnnnnnnnnnnnnnnnnnnnnnnnnnnnnnnnnnnnnnnnnnnnnnnnnnnnnnnnnnnnnnnnnnnnnnnnnnnnnnnnnnnnnnnnnnnnnnnnnnnnnnnnnnnnnnnnnnnnnnnnnnnnnnnnnnnnnnnnnnnnnnnnnnnnnnnnnnnnnnnnnnnnnnnnnnnnnnnnnnnnnnnnnnnnnnnnnnnnnnnnnnnnnnnnnnnnnnnnnnnnnnnnnnnnnnnnnnnnnnnnnnnnnnnnnnnnnnnnnnnnnnnnnnnnnnnnnnnnnnnnnnnnnnnnnnnnnnnnnnnnnnnnnnnnnnnnnnnnnnnnnnnnnnnnnnnnnnnnnnnnnnnnnnnnnnnnnnnnnnnnnnnnnnnnnnnnnnnnnnnnnnnnnnnnnnnnnnnnnnnnnnnnnnnnnnnnnnnnnnnnnnnnnnnnnnnnnnnnnnnnnnnnnnnnnnnnnnnnnnnnnnnnnnnnnnnnnnnnnnnnnnnnnnnnnnnnnnnnnnnnnnnnnnnnnnnnnnnnnnnnnnnnnnnnnnnnnnnnnnnnnnnnnnnnnnnnnnnnnnnnnnnnnnnnnnnnnnnnnnnnnnnnnnnnnnnnnnnnnnnnnnnnnnnnnnnnnnnnnnnnnnnnnnnnnnnnnnnnnnnnnnnnnnnnnnnnnnnnnnnnnnnnnnnnnnnnnnnnnnnnnnnnnnnnnnnnnnnnnnnnnnnnnnnnnnnnnnnnnnnnnnnnnnnnnnnnnnnnnnnnnnnnnnnnnnnnnnnnnnnnnnnnnnnnnnnnnnnnnnnnnnnnnnnnnnnnnnnnnnnnnnnnnnnnnnnnnnnnnnnnnnnnnnnnnnnnnnnnnnnnnnnnnnnnnnnnnnnnnnnnnnnnnnnnnnnnnnnnnnnnnnnnnnnnnnnnnnnnnnnnnnnnnnnnnnnnnnnnnnnnnnnnnnnnnnnnnnnnnnnnnnnnnnnnnnnnnnnnnnnnnnnnnnnnnnnnnnnnnnnnnnnnnnnnnnnnnnnnnnnnnnnnnnnnnnnnnnnnnnnnnnnnnnnnnnnnnnnnnnnnnnnnnnnnnnnnnnnnnnnnnnnnnnnnnnnnnnnnnnnnnnnnnnnnnnnnnnnnnnnnnnnnnnnnnnnnnnnnnnnnnnnnnnnnnnnnnnnnnnnnnnnnnnnnnnnnnnnnnnnnnnnnnnnnnnnnnnnnnnnnnnnnnnnnnnnnnnnnnnnnnnnnnnnnnnnnnnnnnnnnnnnnnnnnnnnnnnnnnnnnnnnnnnnnnnnnnnnnnnnnnnnnnnnnnnnnnnnnnnnnnnnnnnnnnnnnnnnnnnnnnnnnnnnnnnnnnnnnnnnnnnnnnnnnnnnnnnnnnnnnnnnnnnnnnnnnnnnnnnnnnnnnnnnnnnnnnnnnnnnnnnnnnnnnnnnnnnnnnnnnnnnnnnnnnnnnnnnnnnnnnnnnnnnnnnnnnnnnnnnnnnnnnnnnnnnnnnnnnnnnnnnnnnnnnnnnnnnnnnnnnnnnnnnnnnnnnnnnnnnnnnnnnnnnnnnnnnnnnnnnnnnnnnnnnnnnnnnnnnnnnnnnnnnnnnnnnnnnnnnnnnnnnnnnnnnnnnnnnnnnnnnnnnnnnnnnnnnnnnnnnnnnnnnnnnnnnnnnnnnnnnnnnnnnnnnnnnnnnnnnnnnnnnnnnnnnnnnnnnnnnnnnnnnnnnnnnnnnnnnnnnnnnnnnnnnnnnnnnnnnnnnnnnnnnnnnnnnnnnnnnnnnnnnnnnnnnnnnnnnnnnnnnnnnnnnnnnnnnnnnnnnnnnnnnnnnnnnnnnnnnnnnnnnnnnnnnnnnnnnnnnnnnnnnnnnnnnnnnnnnnnnnnnnnnnnnnnnnnnnnnnnnnnnnnnnnnnnnnnnnnnnnnnnnnnnnnnnnnnnnnnnnnnnnnnnnnnnnnnnnnnnnnnnnnnnnnnnnnnnnnnnnnnnnnnnnnnnnnnnnnnnnnnnnnnnnnnnnnnnnnnnnnnnnnnnnnnnnnnnnnnnnnnnnnnnnnnnnnnnnnnnnnnnnnnnnnnnnnnnnnnnnnnnnnnnnnnnnnnnnnnnnnnnnnnnnnnnnnnnnnnnnnnnnnnnnnnnnnnnnnnnnnnnnnnnnnnnnnnnnnnnnnnnnnnnnnnnnnnnnnnnnnnnnnnnnnnnnnnnnnnnnnnnnnnnnnnnnnnnnnnnnnnnnnnnnnnnnnnnnnnnnnnnnnnnnnnnnnnnnnnnnnnnnnnnnnnnnnnnnnnnnnnnnnnnnnnnnnnnnnnnnnnnnnnnnnnnnnnnnnnnnnnnnnnnnnnnnnnnnnnnnnnnnnnnnnnnnnnnnnnnnnnnnnnnnnnnnnnnnnnnnnnnnnnnnnnnnnnnnnnnnnnnnnnnnnnnnnnnnnnnnnnnnnnnnnnnnnnnnnnnnnnnnnnnnnnnnnnnnnnnnnnnnnnnnnnnnnnnnnnnnnnnnnnnnnnnnnnnnnnnnnnnnnnnnnnnnnnnnnnnnnnnnnnnnnnnnnnnnnnnnnnnnnnnnnnnnnnnnnnnnnnnnnnnnnnnnnnnnnnnnnnnnnnnnnnnnnnnnnnnnnnnnnnnnnnnnnnnnnnnnnnnnnnnnnnnnnnnnnnnnnnnnnnnnnnnnnnnnnnnnnnnnnnnnnnnnnnnnnnnnnnnnnnnnnnnnnnnnnnnnnnnnnnnnnnnnnnnnnnnnnnnnnnnnnnnnnnnnnnnnnnnnnnnnnnnnnnnnnnnnnnnnnnnnnnnnnnnnnnnnnnnnnnnnnnnnnnnnnnnnnnnnnnnnnnnnnnnnnnnnnnnnnnnnnnnnnnnnnnnnnnnnnnnnnnnnnnnnnnnnnnnnnnnnnnnnnnnnnnnnnnnnnnnnnnnnnnnnnnnnnnnnnnnnnnnnnnnnnnnnnnnnnnnnnnnnnnnnnnnnnnnnnnnnnnnnnnnnnnnnnnnnnnnnnnnnnnnnnnnnnnnnnnnnnnnnnnnnnnnnnnnnnnnnnnnnnnnnnnnnnnnnnnnnnnnnnnnnnnnnnnnnnnnnnnnnnnnnnnnnnnnnnnnnnnnnnnnnnnnnnnnnnnnnnnnnnnnnnnnnnnnnnnnnnnnnnnnnnnnnnnnnnnnnnnnnnnnnnnnnnnnnnnnnnnnnnnnnnnnnnnnnnnnnnnnnnnnnnnnnnnnnnnnnnnnnnnnnnnnnnnnnnnnnnnnnnnnnnnnnnnnnnnnnnnnnnnnnnnnnnnnnnnnnnnnnnnnnnnnnnnnnnnnnnnnnnnnnnnnnnnnnnnnnnnnnnnnnnnnnnnnnnnnnnnnnnnnnnnnnnnnnnnnnnnnnnnnnnnnnnnnnnnnnnnnnnnnnnnnnnnnnnnnnnnnnnnnnnnnnnnnnnnnnnnnnnnnnnnnnnnnnnnnnnnnnnnnnnnnnnnnnnnnnnnnnnnnnnnnnnnnnnnnnnnnnnnnnnnnnnnnnnnnnnnnnnnnnnnnnnnnnnnnnnnnnnnnnnnnnnnnnnnnnnnnnnnnnnnnnnnnnnnnnnnnnnnnnnnnnnnnnnnnnnnnnnnnnnnnnnnnnnnnnnnnnnnnnnnnnnnnnnnnnnnnnnnnnnnnnnnnnnnnnnnnnnnnnnnnnnnnnnnnnnnnnnnnnnnnnnnnnnnnnnnnnnnnnnnnnnnnnnnnnnnnnnnnnnnnnnnnnnnnnnnnnnnnnnnnnnnnnnnnnnnnnnnnnnnnnnnnnnnnnnnnnnnnnnnnnnnnnnnnnnnnnnnnnnnnnnnnnnnnnnnnnnnnnnnnnnnnnnnnnnnnnnnnnnnnnnnnnnnnnnnnnnnnnnnnnnnnnnnnnnnnnnnnnnnnnnnnnnnnnnnnnnnnnnnnnnnnnnnnnnnnnnnnnnnnnnnnnnnnnnnnnnnnnnnnnnnnnnnnnnnnnnnnnnnnnnnnnnnnnnnnnnnnnnnnnnnnnnnnnnnnnnnnnnnnnnnnnnnnnnnnnnnnnnnnnnnnnnnnnnnnnnnnnnnnnnnnnnnnnnnnnnnnnnnnnnnnnnnnnnnnnnnnnnnnnnnnnnnnnnnnnnnnnnnnnnnnnnnnnnnnnnnnnnnnnnnnnnnnnnnnnnnnnnnnnnnnnnnnnnnnnnnnnnnnnnnnnnnnnnnnnnnnnnnnnnnnnnnnnnnnnnnnnnnnnnnnnnnnnnnnnnnnnnnnnnnnnnnnnnnnnnnnnnnnnnnnnnnnnnnnnnnnnnnnnnnnnnnnnnnnnnnnnnnnnnnnnnnnnnnnnnnnnnnnnnnnnnnnnnnnnnnnnnnnnnnnnnnnnnnnnnnnnnnnnnnnnnnnnnnnnnnnnnnnnnnnnnnnnnnnnnnnnnnnnnnnnnnnnnnnnnnnnnnnnnnnnnnnnnnnnnnnnnnnnnnnnnnnnnnnnnnnnnnnnnnnnnnnnnnnnnnnnnnnnnnnnnnnnnnnnnnnnnnnnnnnnnnnnnnnnnnnnnnnnnnnnnnnnnnnnnnnnnnnnnnnnnnnnnnnnnnnnnnnnnnnnnnnnnnnnnnnnnnnnnnnnnnnnnnnnnnnnnnnnnnnnnnnnnnnnnnnnnnnnnnnnnnnnnnnnnnnnnnnnnnnnnnnnnnnnnnnnnnnnnnnnnnnnnnnnnnnnnnnnnnnnnnnnnnnnnnnnnnnnnnnnnnnnnnnnnnnnnnnnnnnnnnnnnnnnnnnnnnnnnnnnnnnnnnnnnnnnnnnnnnnnnnnnnnnnnnnnnnnnnnnnnnnnnnnnnnnnnnnnnnnnnnnnnnnnnnnnnnnnnnnnnnnnnnnnnnnnnnnnnnnnnnnnnnnnnnnnnnnnnnnnnnnnnnnnnnnnnnnnnnnnnnnnnnnnnnnnnnnnnnnnnnnnnnnnnnnnnnnnnnnnnnnnnnnnnnnnnnnnnnnnnnnnnnnnnnnnnnnnnnnnnnnnnnnnnnnnnnnnnnnnnnnnnnnnnnnnnnnnnnnnnnnnnnnnnnnnnnnnnnnnnnnnnnnnnnnnnnnnnnnnnnnnnnnnnnnnnnnnnnnnnnnnnnnnnnnnnnnnnnnnnnnnnnnnnnnnnnnnnnnnnnnnnnnnnnnnnnnnnnnnnnnnnnnnnnnnnnnnnnnnnnnnnnnnnnnnnnnnnnnnnnnnnnnnnnnnnnnnnnnnnnnnnnnnnnnnnnnnnnnnnnnnnnnnnnnnnnnnnnnnnnnnnnnnnnnnnnnnnnnnnnnnnnnnnnnnnnnnnnnnnnnnnnnnnnnnnnnnnnnnnnnnnnnnnnnnnnnnnnnnnnnnnnnnnnnnnnnnnnnnnnnnnnnnnnnnnnnnnnnnnnnnnnnnnnnnnnnnnnnnnnnnnnnnnnnnnnnnnnnnnnnnnnnnnnnnnnnnnnnnnnnnnnnnnnnnnnnnnnnnnnnnnnnnnnnnnnnnnnnnnnnnnnnnnnnnnnnnnnnnnnnnnnnnnnnnnnnnnnnnnnnnnnnnnnnnnnnnnnnnnnnnnnnnnnnnnnnnnnnnnnnnnnnnnnnnnnnnnnnnnnnnnnnnnnnnnnnnnnnnnnnnnnnnnnnnnnnnnnnnnnnnnnnnnnnnnnnnnnnnnnnnnnnnnnnnnnnnnnnnnnnnnnnnnnnnnnnnnnnnnnnnnnnnnnnnnnnnnnnnnnnnnnnnnnnnnnnnnnnnnnnnnnnnnnnnnnnnnnnnnnnnnnnnnnnnnnnnnnnnnnnnnnnnnnnnnnnnnnnnnnnnnnnnnnnnnnnnnnnnnnnnnnnnnnnnnnnnnnnnnnnnnnnnnnnnnnnnnnnnnnnnnnnnnnnnnnnnnnnnnnnnnnnnnnnnnnnnnnnnnnnnnnnnnnnnnnnnnnnnnnnnnnnnnnnnnnnnnnnnnnnnnnnnnnnnnnnnnnnnnnnnnnnnnnnnnnnnnnnnnnnnnnnnnnnnnnnnnnnnnnnnnnnnnnnnnnnnnnnnnnnnnnnnnnnnnnnnnnnnnnnnnnnnnnnnnnnnnnnnnnnnnnnnnnnnnnnnnnnnnnnnnnnnnnnnnnnnnnnnnnnnnnnnnnnnnnnnnnnnnnnnnnnnnnnnnnnnnnnnnnnnnnnnnnnnnnnnnnnnnnnnnnnnnnnnnnnnnnnnnnnnnnnnnnnnnnnnnnnnnnnnnnnnnnnnnnnnnnnnnnnnnnnnnnnnnnnnnnnnnnnnnnnnnnnnnnnnnnnnnnnnnnnnnnnnnnnnnnnnnnnnnnnnnnnnnnnnnnnnnnnnnnnnnnnnnnnnnnnnnnnnnnnnnnnnnnnnnnnnnnnnnnnnnnnnnnnnnnnnnnnnnnnnnnnnnnnnnnnnnnnnnnnnnnnnnnnnnnnnnnnnnnnnnnnnnnnnnnnnnnnnnnnnnnnnnnnnnnnnnnnnnnnnnnnnnnnnnnnnnnnnnnnnnnnnnnnnnnnnnnnnnnnnnnnnnnnnnnnnnnnnnnnnnnnnnnnnnnnnnnnnnnnnnnnnnnnnnnnnnnnnnnnnnnnnnnnnnnnnnnnnnnnnnnnnnnnnnnnnnnnnnnnnnnnnnnnnnnnnnnnnnnnnnnnnnnnnnnnnnnnnnnnnnnnnnnnnnnnnnnnnnnnnnnnnnnnnnnnnnnnnnnnnnnnnnnnnnnnnnnnnnnnnnnnnnnnnnnnnnnnnnnnnnnnnnnnnnnnnnnnnnnnnnnnnnnnnnnnnnnnnnnnnnnnnnnnnnnnnnnnnnnnnnnnnnnnnnnnnnnnnnnnnnnnnnnnnnnnnnnnnnnnnnnnnnnnnnnnnnnnnnnnnnnnnnnnnnnnnnnnnnnnnnnnnnnnnnnnnnnnnnnnnnnnnnnnnnnnnnnnnnnnnnnnnnnnnnnnnnnnnnnnnnnnnnnnnnnnnnnnnnnnnnnnnnnnnnnnnnnnnnnnnnnnnnnnnnnnnnnnnnnnnnnnnnnnnnnnnnnnnnnnnnnnnnnnnnnnnnnnnnnnnnnnnnnnnnnnnnnnnnnnnnnnnnnnnnnnnnnnnnnnnnnnnnnnnnnnnnnnnnnnnnnnnnnnnnnnnnnnnnnnnnnnnnnnnnnnnnnnnnnnnnnnnnnnnnnnnnnnnnnnnnnnnnnnnnnnnnnnnnnnnnnnnnnnnnnnnnnnnnnnnnnnnnnnnnnnnnnnnnnnnnnnnnnnnnnnnnnnnnnnnnnnnnnnnnnnnnnnnnnnnnnnnnnnnnnnnnnnnnnnnnnnnnnnnnnnnnnnnnnnnnnnnnnnnnnnnnnnnnnnnnnnnnnnnnnnnnnnnnnnnnnnnnnnnnnnnnnnnnnnnnnnnnnnnnnnnnnnnnnnnnnnnnnnnnnnnnnnnnnnnnnnnnnnnnnnnnnnnnnnnnnnnnnnnnnnnnnnnnnnnnnnnnnnnnnnnnnnnnnnnnnnnnnnnnnnnnnnnnnnnnnnnnnnnnnnnnnnnnnnnnnnnnnnnnnnnnnnnnnnnnnnnnnnnnnnnnnnnnnnnnnnnnnnnnnnnnnnnnnnnnnnnnnnnnnnnnnnnnnnnnnnnnnnnnnnnnnnnnnnnnnnnnnnnnnnnnnnnnnnnnnnnnnnnnnnnnnnnnnnnnnnnnnnnnnnnnnnnnnnnnnnnnnnnnnnnnnnnnnnnnnnnnnnnnnnnnnnnnnnnnnnnnnnnnnnnnnnnnnnnnnnnnnnnnnnnnnnnnnnnnnnnnnnnnnnnnnnnnnnnnnnnnnnnnnnnnnnnnnnnnnnnnnnnnnnnnnnnnnnnnnnnnnnnnnnnnnnnnnnnnnnnnnnnnnnnnnnnnnnnnnnnnnnnnnnnnnnnnnnnnnnnnnnnnnnnnnnnnnnnnnnnnnnnnnnnnnnnnnnnnnnnnnnnnnnnnnnnnnnnnnnnnnnnnnnnnnnnnnnnnnnnnnnnnnnnnnnnnnnnnnnnnnnnnnnnnnnnnnnnnnnnnnnnnnnnnnnnnnnnnnnnnnnnnnnnnnnnnnnnnnnnnnnnnnnnnnnnnnnnnnnnnnnnnnnnnnnnnnnnnnnnnnnnnnnnnnnnnnnnnnnnnnnnnnnnnnnnnnnnnnnnnnnnnnnnnnnnnnnnnnnnnnnnnnnnnnnnnnnnnnnnnnnnnnnnnnnnnnnnnnnnnnnnnnnnnnnnnnnnnnnnnnnnnnnnnnnnnnnnnnnnnnnnnnnnnnnnnnnnnnnnnnnnnnnnnnnnnnnnnnnnnnnnnnnnnnnnnnnnnnnnnnnnnnnnnnnnnnnnnnnnnnnnnnnnnnnnnnnnnnnnnnnnnnnnnnnnnnnnnnnnnnnnnnnnnnnnnnnnnnnnnnnnnnnnnnnnnnnnnnnnnnnnnnnnnnnnnnnnnnnnnnnnnnnnnnnnnnnnnnnnnnnnnnnnnnnnnnnnnnnnnnnnnnnnnnnnnnnnnnnnnnnnnnnnnnnnnnnnnnnnnnnnnnnnnnnnnnnnnnnnnnnnnnnnnnnnnnnnnnnnnnnnnnnnnnnnnnnnnnnnnnnnnnnnnnnnnnnnnnnnnnnnnnnnnnnnnnnnnnnnnnnnnnnnnnnnnnnnnnnnnnnnnnnnnnnnnnnnnnnnnnnnnnnnnnnnnnnnnnnnnnnnnnnnnnnnnnnnnnnnnnnnnnnnnnnnnnnnnnnnnnnnnnnnnnnnnnnnnnnnnnnnnnnnnnnnnnnnnnnnnnnnnnnnnnnnnnnnnnnnnnnnnnnnnnnnnnnnnnnnnnnnnnnnnnnnnnnnnnnnnnnnnnnnnnnnnnnnnnnnnnnnnnnnnnnnnnnnnnnnnnnnnnnnnnnnnnnnnnnnnnnnnnnnnnnnnnnnnnnnnnnnnnnnnnnnnnnnnnnnnnnnnnnnnnnnnnnnnnnnnnnnnnnnnnnnnnnnnnnnnnnnnnnnnnnnnnnnnnnnnnnnnnnnnnnnnnnnnnnnnnnnnnnnnnnnnnnnnnnnnnnnnnnnnnnnnnnnnnnnnnnnnnnnnnnnnnnnnnnnnnnnnnnnnnnnnnnnnnnnnnnnnnnnnnnnnnnnnnnnnnnnnnnnnnnnnnnnnnnnnnnnnnnnnnnnnnnnnnnnnnnnnnnnnnnnnnnnnnnnnnnnnnnnnnnnnnnnnnnnnnnnnnnnnnnnnnnnnnnnnnnnnnnnnnnnnnnnnnnnnnnnnnnnnnnnnnnnnnnnnnnnnnnnnnnnnnnnnnnnnnnnnnnnnnnnnnnnnnnnnnnnnnnnnnnnnnnnnnnnnnnnnnnnnnnnnnnnnnnnnnnnnnnnnnnnnnnnnnnnnnnnnnnnnnnnnnnnnnnnnnnnnnnnnnnnnnnnnnnnnnnnnnnnnnnnnnnnnnnnnnnnnnnnnnnnnnnnnnnnnnnnnnnnnnnnnnnnnnnnnnnnnnnnnnnnnnnnnnnnnnnnnnnnnnnnnnnnnnnnnnnnnnnnnnnnnnnnnnnnnnnnnnnnnnnnnnnnnnnnnnnnnnnnnnnnnnnnnnnnnnnnnnnnnnnnnnnnnnnnnnnnnnnnnnnnnnnnnnnnnnnnnnnnnnnnnnnnnnnnnnnnnnnnnnnnnnnnnnnnnnnnnnnnnnnnnnnnnnnnnnnnnnnnnnnnnnnnnnnnnnnnnnnnnnnnnnnnnnnnnnnnnnnnnnnnnnnnnnnnnnnnnnnnnnnnnnnnnnnnnnnnnnnnnnnnnnnnnnnnnnnnnnnnnnnnnnnnnnnnnnnnnnnnnnnnnnnnnnnnnnnnnnnnnnnnnnnnnnnnnnnnnnnnnnnnnnnnnnnnnnnnnnnnnnnnnnnnnnnnnnnnnnnnnnnnnnnnnnnnnnnnnnnnnnnnnnnnnnnnnnnnnnnnnnnnnnnnnnnnnnnnnnnnnnnnnnnnnnnnnnnnnnnnnnnnnnnnnnnnnnnnnnnnnnnnnnnnnnnnnnnnnnnnnnnnnnnnnnnnnnnnnnnnnnnnnnnnnnnnnnnnnnnnnnnnnnnnnnnnnnnnnnnnnnnnnnnnnnnnnnnnnnnnnnnnnnnnnnnnnnnnnnnnnnnnnnnnnnnnnnnnnnnnnnnnnnnnnnnnnnnnnnnnnnnnnnnnnnnnnnnnnnnnnnnnnnnnnnnnnnnnnnnnnnnnnnnnnnnnnnnnnnnnnnnnnnnnnnnnnnnnnnnnnnnnnnnnnnnnnnnnnnnnnnnnnnnnnnnnnnnnnnnnnnnnnnnnnnnnnnnnnnnnnnnnnnnnnnnnnnnnnnnnnnnnnnnnnnnnnnnnnnnnnnnnnnnnnnnnnnnnnnnnnnnnnnnnnnnnnnnnnnnnnnnnnnnnnnnnnnnnnnnnnnnnnnnnnnnnnnnnnnnnnnnnnnnnnnnnnnnnnnnnnnnnnnnnnnnnnnnnnnnnnnnnnnnnnnnnnnnnnnnnnnnnnnnnnnnnnnnnnnnnnnnnnnnnnnnnnnnnnnnnnnnnnnnnnnnnnnnnnnnnnnnnnnnnnnnnnnnnnnnnnnnnnnnnnnnnnnnnnnnnnnnnnnnnnnnnnnnnnnnnnnnnnnnnnnnnnnnnnnnnnnnnnnnnnnnnnnnnnnnnnnnnnnnnnnnnnnnnnnnnnnnnnnnnnnnnnnnnnnnnnnnnnnnnnnnnnnnnnnnnnnnnnnnnnnnnnnnnnnnnnnnnnnnnnnnnnnnnnnnnnnnnnnnnnnnnnnnnnnnnnnnnnnnnnnnnnnnnnnnnnnnnnnnnnnnnnnnnnnnnnnnnnnnnnnnnnnnnnnnnnnnnnnnnnnnnnnnnnnnnnnnnnnnnnnnnnnnnnnnnnnnnnnnnnnnnnnnnnnnnnnnnnnnnnnnnnnnnnnnnnnnnnnnnnnnnnnnnnnnnnnnnnnnnnnnnnnnnnnnnnnnnnnnnnnnnnnnnnnnnnnnnnnnnnnnnnnnnnnnnnnnnnnnnnnnnnnnnnnnnnnnnnnnnnnnnnnnnnnnnnnnnnnnnnnnnnnnnnnnnnnnnnnnnnnnnnnnnnnnnnnnnnnnnnnnnnnnnnnnnnnnnnnnnnnnnnnnnnnnnnnnnnnnnnnnnnnnnnnnnnnnnnnnnnnnnnnnnnnnnnnnnnnnnnnnnnnnnnnnnnnnnnnnnnnnnnnnnnnnnnnnnnnnnnnnnnnnnnnnnnnnnnnnnnnnnnnnnnnnnnnnnnnnnnnnnnnnnnnnnnnnnnnnnnnnnnnnnnnnnnnnnnnnnnnnnnnnnnnnnnnnnnnnnnnnnnnnnnnnnnnnnnnnnnnnnnnnnnnnnnnnnnnnnnnnnnnnnnnnnnnnnnnnnnnnnnnnnnnnnnnnnnnnnnnnnnnnnnnnnnnnnnnnnnnnnnnnnnnnnnnnnnnnnnnnnnnnnnnnnnnnnnnnnnnnnnnnnnnnnnnnnnnnnnnnnnnnnnnnnnnnnnnnnnnnnnnnnnnnnnnnnnnnnnnnnnnnnnnnnnnnnnnnnnnnnnnnnnnnnnnnnnnnnnnnnnnnnnnnnnnnnnnnnnnnnnnnnnnnnnnnnnnnnnnnnnnnnnnnnnnnnnnnnnnnnnnnnnnnnnnnnnnnnnnnnnnnnnnnnnnnnnnnnnnnnnnnnnnnnnnnnnnnnnnnnnnnnnnnnnnnnnnnnnnnnnnnnnnnnnnnnnnnnnnnnnnnnnnnnnnnnnnnnnnnnnnnnnnnnnnnnnnnnnnnnnnnnnnnnnnnnnnnnnnnnnnnnnnnnnnnnnnnnnnnnnnnnnnnnnnnnnnnnnnnnnnnnnnnnnnnnnnnnnnnnnnnnnnnnnnnnnnnnnnnnnnnnnnnnnnnnnnnnnnnnnnnnnnnnnnnnnnnnnnnnnnnnnnnnnnnnnnnnnnnnnnnnnnnnnnnnnnnnnnnnnnnnnnnnnnnnnnnnnnnnnnnnnnnnnnnnnnnnnnnnnnnnnnnnnnnnnnnnnnnnnnnnnnnnnnnnnnnnnnnnnnnnnnnnnnnnnnnnnnnnnnnnnnnnnnnnnnnnnnnnnnnnnnnnnnnnnnnnnnnnnnnnnnnnnnnnnnnnnnnnnnnnnnnnnnnnnnnnnnnnnnnnnnnnnnnnnnnnnnnnnnnnnnnnnnnnnnnnnnnnnnnnnnnnnnnnnnnnnnnnnnnnnnnnnnnnnnnnnnnnnnnnnnnnnnnnnnnnnnnnnnnnnnnnnnnnnnnnnnnnnnnnnnnnnnnnnnnnnnnnnnnnnnnnnnnnnnnnnnnnnnnnnnnnnnnnnnnnnnnnnnnnnnnnnnnnnnnnnnnnnnnnnnnnnnnnnnnnnnnnnnnnnnnnnnnnnnnnnnnnnnnnnnnnnnnnnnnnnnnnnnnnnnnnnnnnnnnnnnnnnnnnnnnnnnnnnnnnnnnnnnnnnnnnnnnnnnnnnnnnnnnnnnnnnnnnnnnnnnnnnnnnnnnnnnnnnnnnnnnnnnnnnnnnnnnnnnnnnnnnnnnnnnnnnnnnnnnnnnnnnnnnnnnnnnnnnnnnnnnnnnnnnnnnnnnnnnnnnnnnnnnnnnnnnnnnnnnnnnnnnnnnnnnnnnnnnnnnnnnnnnnnnnnnnnnnnnnnnnnnnnnnnnnnnnnnnnnnnnnnnnnnnnnnnnnnnnnnnnnnnnnnnnnnnnnnnnnnnnnnnnnnnnnnnnnnnnnnnnnnnnnnnnnnnnnnnnnnnnnnnnnnnnnnnnnnnnnnnnnnnnnnnnnnnnnnnnnnnnnnnnnnnnnnnnnnnnnnnnnnnnnnnnnnnnnnnnnnnnnnnnnnnnnnnnnnnnnnnnnnnnnnnnnnnnnnnnnnnnnnnnnnnnnnnnnnnnnnnnnnnnnnnnnnnnnnnnnnnnnnnnnnnnnnnnnnnnnnnnnnnnnnnnnnnnnnnnnnnnnnnnnnnnnnnnnnnnnnnnnnnnnnnnnnnnnnnnnnnnnnnnnnnnnnnnnnnnnnnnnnnnnnnnnnnnnnnnnnnnnnnnnnnnnnnnnnnnnnnnnnnnnnnnnnnnnnnnnnnnnnnnnnnnnnnnnnnnnnnnnnnnnnnnnnnnnnnnnnnnnnnnnnnnnnnnnnnnnnnnnnnnnnnnnnnnnnnnnnnnnnnnnnnnnnnnnnnnnnnnnnnnnnnnnnnnnnnnnnnnnnnnnnnnnnnnnnnnnnnnnnnnnnnnnnnnnnnnnnnnnnnnnnnnnnnnnnnnnnnnnnnnnnnnnnnnnnnnnnnnnnnnnnnnnnnnnnnnnnnnnnnnnnnnnnnnnnnnnnnnnnnnnnnnnnnnnnnnnnnnnnnnnnnnnnnnnnnnnnnnnnnnnnnnnnnnnnnnnnnnnnnnnnnnnnnnnnnnnnnnnnnnnnnnnnnnnnnnnnnnnnnnnnnnnnnnnnnnnnnnnnnnnnnnnnnnnnnnnnnnnnnnnnnnnnnnnnnnnnnnnnnnnnnnnnnnnnnnnnnnnnnnnnnnnnnnnnnnnnnnnnnnnnnnnnnnnnnnnnnnnnnnnnnnnnnnnnnnnnnnnnnnnnnnnnnnnnnnnnnnnnnnnnnnnnnnnnnnnnnnnnnnnnnnnnnnnnnnnnnnnnnnnnnnnnnnnnnnnnnnnnnnnnnnnnnnnnnnnnnnnnnnnnnnnnnnnnnnnnnnnnnnnnnnnnnnnnnnnnnnnnnnnnnnnnnnnnnnnnnnnnnnnnnnnnnnnnnnnnnnnnnnnnnnnnnnnnnnnnnnnnnnnnnnnnnnnnnnnnnnnnnnnnnnnnnnnnnnnnnnnnnnnnnnnnnnnnnnnnnnnnnnnnnnnnnnnnnnnnnnnnnnnnnnnnnnnnnnnnnnnnnnnnnnnnnnnnnnnnnnnnnnnnnnnnnnnnnnnnnnnnnnnnnnnnnnnnnnnnnnnnnnnnnnnnnnnnnnnnnnnnnnnnnnnnnnnnnnnnnnnnnnnnnnnnnnnnnnnnnnnnnnnnnnnnnnnnnnnnnnnnnnnnnnnnnnnnnnnnnnnnnnnnnnnnnnnnnnnnnnnnnnnnnnnnnnnnnnnnnnnnnnnnnnnnnnnnnnnnnnnnnnnnnnnnnnnnnnnnnnnnnnnnnnnnnnnnnnnnnnnnnnnnnnnnnnnnnnnnnnnnnnnnnnnnnnnnnnnnnnnnnnnnnnnnnnnnnnnnnnnnnnnnnnnnnnnnnnnnnnnnnnnnnnnnnnnnnnnnnnnnnnnnnnnnnnnnnnnnnnnnnnnnnnnnnnnnnnnnnnnnnnnnnnnnnnnnnnnnnnnnnnnnnnnnnnnnnnnnnnnnnnnnnnnnnnnnnnnnnnnnnnnnnnnnnnnnnnnnnnnnnnnnnnnnnnnnnnnnnnnnnnnnnnnnnnnnnnnnnnnnnnnnnnnnnnnnnnnnnnnnnnnnnnnnnnnnnnnnnnnnnnnnnnnnnnnnnnnnnnnnnnnnnnnnnnnnnnnnnnnnnnnnnnnnnnnnnnnnnnnnnnnnnnnnnnnnnnnnnnnnnnnnnnnnnnnnnnnnnnnnnnnnnnnnnnnnnnnnnnnnnnnnnnnnnnnnnnnnnnnnnnnnnnnnnnnnnnnnnnnnnnnnnnnnnnnnnnnnnnnnnnnnnnnnnnnnnnnnnnnnnnnnnnnnnnnnnnnnnnnnnnnnnnnnnnnnnnnnnnnnnnnnnnnnnnnnnnnnnnnnnnnnnnnnnnnnnnnnnnnnnnnnnnnnnnnnnnnnnnnnnnnnnnnnnnnnnnnnnnnnnnnnnnnnnnnnnnnnnnnnnnnnnnnnnnnnnnnnnnnnnnnnnnnnnnnnnnnnnnnnnnnnnnnnnnnnnnnnnnnnnnnnnnnnnnnnnnnnnnnnnnnnnnnnnnnnnnnnnnnnnnnnnnnnnnnnnnnnnnnnnnnnnnnnnnnnnnnnnnnnnnnnnnnnnnnnnnnnnnnnnnnnnnnnnnnnnnnnnnnnnnnnnnnnnnnnnnnnnnnnnnnnnnnnnnnnnnnnnnnnnnnnnnnnnnnnnnnnnnnnnnnnnnnnnnnnnnnnnnnnnnnnnnnnnnnnnnnnnnnnnnnnnnnnnnnnnnnnnnnnnnnnnnnnnnnnnnnnnnnnnnnnnnnnnnnnnnnnnnnnnnnnnnnnnnnnnnnnnnnnnnnnnnnnnnnnnnnnnnnnnnnnnnnnnnnnnnnnnnnnnnnnnnnnnnnnnnnnnnnnnnnnnnnnnnnnnnnnnnnnnnnnnnnnnnnnnnnnnnnnnnnnnnnnnnnnnnnnnnnnnnnnnnnnnnnnnnnnnnnnnnnnnnnnnnnnnnnnnnnnnnnnnnnnnnnnnnnnnnnnnnnnnnnnnnnnnnnnnnnnnnnnnnnnnnnnnnnnnnnnnnnnnnnnnnnnnnnnnnnnnnnnnnnnnnnnnnnnnnnnnnnnnnnnnnnnnnnnnnnnnnnnnnnnnnnnnnnnnnnnnnnnnnnnnnnnnnnnnnnnnnnnnnnnnnnnnnnnnnnnnnnnnnnnnnnnnnnnnnnnnnnnnnnnnnnnnnnnnnnnnnnnnnnnnnnnnnnnnnnnnnnnnnnnnnnnnnnnnnnnnnnnnnnnnnnnnnnnnnnnnnnnnnnnnnnnnnnnnnnnnnnnnnnnnnnnnnnnnnnnnnnnnnnnnnnnnnnnnnnnnnnnnnnnnnnnnnnnnnnnnnnnnnnnnnnnnnnnnnnnnnnnnnnnnnnnnnnnnnnnnnnnnnnnnnnnnnnnnnnnnnnnnnnnnnnnnnnnnnnnnnnnnnnnnnnnnnnnnnnnnnnnnnnnnnnnnnnnnnnnnnnnnnnnnnnnnnnnnnnnnnnnnnnnnnnnnnnnnnnnnnnnnnnnnnnnnnnnnnnnnnnnnnnnnnnnnnnnnnnnnnnnnnnnnnnnnnnnnnnnnnnnnnnnnnnnnnnnnnnnnnnnnnnnnnnnnnnnnnnnnnnnnnnnnnnnnnnnnnnnnnnnnnnnnnnnnnnnnnnnnnnnnnnnnnnnnnnnnnnnnnnnnnnnnnnnnnnnnnnnnnnnnnnnnnnnnnnnnnnnnnnnnnnnnnnnnnnnnnnnnnnnnnnnnnnnnnnnnnnnnnnnnnnnnnnnnnnnnnnnnnnnnnnnnnnnnnnnnnnnnnnnnnnnnnnnnnnnnnnnnnnnnnnnnnnnnnnnnnnnnnnnnnnnnnnnnnnnnnnnnnnnnnnnnnnnnnnnnnnnnnnnnnnnnnnnnnnnnnnnnnnnnnnnnnnnnnnnnnnnnnnnnnnnnnnnnnnnnnnnnnnnnnnnnnnnnnnnnnnnnnnnnnnnnnnnnnnnnnnnnnnnnnnnnnnnnnnnnnnnnnnnnnnnnnnnnnnnnnnnnnnnnnnnnnnnnnnnnnnnnnnnnnnnnnnnnnnnnnnnnnnnnnnnnnnnnnnnnnnnnnnnnnnnnnnnnnnnnnnnnnnnnnnnnnnnnnnnnnnnnnnnnnnnnnnnnnnnnnnnnnnnnnnnnnnnnnnnnnnnnnnnnnnnnnnnnnnnnnnnnnnnnnnnnnnnnnnnnnnnnnnnnnnnnnnnnnnnnnnnnnnnnnnnnnnnnnnnnnnnnnnnnnnnnnnnnnnnnnnnnnnnnnnnnnnnnnnnnnnnnnnnnnnnnnnnnnnnnnnnnnnnnnnnnnnnnnnnnnnnnnnnnnnnnnnnnnnnnnnnnnnnnnnnnnnnnnnnnnnnnnnnnnnnnnnnnnnnnnnnnnnnnnnnnnnnnnnnnnnnnnnnnnnnnnnnnnnnnnnnnnnnnnnnnnnnnnnnnnnnnnnnnnnnnnnnnnnnnnnnnnnnnnnnnnnnnnnnnnnnnnnnnnnnnnnnnnnnnnnnnnnnnnnnnnnnnnnnnnnnnnnnnnnnnnnnnnnnnnnnnnnnnnnnnnnnnnnnnnnnnnnnnnnnnnnnnnnnnnnnnnnnnnnnnnnnnnnnnnnnnnnnnnnnnnnnnnnnnnnnnnnnnnnnnnnnnnnnnnnnnnnnnnnnnnnnnnnnnnnnnnnnnnnnnnnnnnnnnnnnnnnnnnnnnnnnnnnnnnnnnnnnnnnnnnnnnnnnnnnnnnnnnnnnnnnnnnnnnnnnnnnnnnnnnnnnnnnnnnnnnnnnnnnnnnnnnnnnnnnnnnnnnnnnnnnnnnnnnnnnnnnnnnnnnnnnnnnnnnnnnnnnnnnnnnnnnnnnnnnnnnnnnnnnnnnnnnnnnnnnnnnnnnnnnnnnnnnnnnnnnnnnnnnnnnnnnnnnnnnnnnnnnnnnnnnnnnnnnnnnnnnnnnnnnnnnnnnnnnnnnnnnnnnnnnnnnnnnnnnnnnnnnnnnnnnnnnnnnnnnnnnnnnnnnnnnnnnnnnnnnnnnnnnnnnnnnnnnnnnnnnnnnnnnnnnnnnnnnnnnnnnnnnnnnnnnnnnnnnnnnnnnnnnnnnnnnnnnnnnnnnnnnnnnnnnnnnnnnnnnnnnnnnnnnnnnnnnnnnnnnnnnnnnnnnnnnnnnnnnnnnnnnnnnnnnnnnnnnnnnnnnnnnnnnnnnnnnnnnnnnnnnnnnnnnnnnnnnnnnnnnnnnnnnnnnnnnnnnnnnnnnnnnnnnnnnnnnnnnnnnnnnnnnnnnnnnnnnnnnnnnnnnnnnnnnnnnnnnnnnnnnnnnnnnnnnnnnnnnnnnnnnnnnnnnnnnnnnnnnnnnnnnnnnnnnnnnnnnnnnnnnnnnnnnnnnnnnnnnnnnnnnnnnnnnnnnnnnnnnnnnnnnnnnnnnnnnnnnnnnnnnnnnnnnnnnnnnnnnnnnnnnnnnnnnnnnnnnnnnnnnnnnnnnnnnnnnnnnnnnnnnnnnnnnnnnnnnnnnnnnnnnnnnnnnnnnnnnnnnnnnnnnnnnnnnnnnnnnnnnnnnnnnnnnnnnnnnnnnnnnnnnnnnnnnnnnnnnnnnnnnnnnnnnnnnnnnnnnnnnnnnnnnnnnnnnnnnnnnnnnnnnnnnnnnnnnnnnnnnnnnnnnnnnnnnnnnnnnnnnnnnnnnnnnnnnnnnnnnnnnnnnnnnnnnnnnnnnnnnnnnnnnnnnnnnnnnnnnnnnnnnnnnnnnnnnnnnnnnnnnnnnnnnnnnnnnnnnnnnnnnnnnnnnnnnnnnnnnnnnnnnnnnnnnnnnnnnnnnnnnnnnnnnnnnnnnnnnnnnnnnnnnnnnnnnnnnnnnnnnnnnnnnnnnnnnnnnnnnnnnnnnnnnnnnnnnnnnnnnnnnnnnnnnnnnnnnnnnnnnnnnnnnnnnnnnnnnnnnnnnnnnnnnnnnnnnnnnnnnnnnnnnnnnnnnnnnnnnnnnnnnnnnnnnnnnnnnnnnnnnnnnnnnnnnnnnnnnnnnnnnnnnnnnnnnnnnnnnnnnnnnnnnnnnnnnnnnnnnnnnnnnnnnnnnnnnnnnnnnnnnnnnnnnnnnnnnnnnnnnnnnnnnnnnnnnnnnnnnnnnnnnnnnnnnnnnnnnnnnnnnnnnnnnnnnnnnnnnnnnnnnnnnnnnnnnnnnnnnnnnnnnnnnnnnnnnnnnnnnnnnnnnnnnnnnnnnnnnnnnnnnnnnnnnnnnnnnnnnnnnnnnnnnnnnnnnnnnnnnnnnnnnnnnnnnnnnnnnnnnnnnnnnnnnnnnnnnnnnnnnnnnnnnnnnnnnnnnnnnnnnnnnnnnnnnnnnnnnnnnnnnnnnnnnnnnnnnnnnnnnnnnnnnnnnnnnnnnnnnnnnnnnnnnnnnnnnnnnnnnnnnnnnnnnnnnnnnnnnnnnnnnnnnnnnnnnnnnnnnnnnnnnnnnnnnnnnnnnnnnnnnnnnnnnnnnnnnnnnnnnnnnnnnnnnnnnnnnnnnnnnnnnnnnnnnnnnnnnnnnnnnnnnnnnnnnnnnnnnnnnnnnnnnnnnnnnnnnnnnnnnnnnnnnnnnnnnnnnnnnnnnnnnnnnnnnnnnnnnnnnnnnnnnnnnnnnnnnnnnnnnnnnnnnnnnnnnnnnnnnnnnnnnnnnnnnnnnnnnnnnnnnnnnnnnnnnnnnnnnnnnnnnnnnnnnnnnnnnnnnnnnnnnnnnnnnnnnnnnnnnnnnnnnnnnnnnnnnnnnnnnnnnnnnnnnnnnnnnnnnnnnnnnnnnnnnnnnnnnnnnnnnnnnnnnnnnnnnnnnnnnnnnnnnnnnnnnnnnnnnnnnnnnnnnnnnnnnnnnnnnnnnnnnnnnnnnnnnnnnnnnnnnnnnnnnnnnnnnnnnnnnnnnnnnnnnnnnnnnnnnnnnnnnnnnnnnnnnnnnnnnnnnnnnnnnnnnnnnnnnnnnnnnnnnnnnnnnnnnnnnnnnnnnnnnnnnnnnnnnnnnnnnnnnnnnnnnnnnnnnnnnnnnnnnnnnnnnnnnnnnnnnnnnnnnnnnnnnnnnnnnnnnnnnnnnnnnnnnnnnnnnnnnnnnnnnnnnnnnnnnnnnnnnnnnnnnnnnnnnnnnnnnnnnnnnnnnnnnnnnnnnnnnnnnnnnnnnnnnnnnnnnnnnnnnnnnnnnnnnnnnnnnnnnnnnnnnnnnnnnnnnnnnnnnnnnnnnnnnnnnnnnnnnnnnnnnnnnnnnnnnnnnnnnnnnnnnnnnnnnnnnnnnnnnnnnnnnnnnnnnnnnnnnnnnnnnnnnnnnnnnnnnnnnnnnnnnnnnnnnnnnnnnnnnnnnnnnnnnnnnnnnnnnnnnnnnnnnnnnnnnnnnnnnnnnnnnnnnnnnnnnnnnnnnnnnnnnnnnnnnnnnnnnnnnnnnnnnnnnnnnnnnnnnnnnnnnnnnnnnnnnnnnnnnnnnnnnnnnnnnnnnnnnnnnnnnnnnnnnnnnnnnnnnnnnnnnnnnnnnnnnnnnnnnnnnnnnnnnnnnnnnnnnnnnnnnnnnnnnnnnnnnnnnnnnnnnnnnnnnnnnnnnnnnnnnnnnnnnnnnnnnnnnnnnnnnnnnnnnnnnnnnnnnnnnnnnnnnnnnnnnnnnnnnnnnnnnnnnnnnnnnnnnnnnnnnnnnnnnnnnnnnnnnnnnnnnnnnnnnnnnnnnnnnnnnnnnnnnnnnnnnnnnnnnnnnnnnnnnnnnnnnnnnnnnnnnnnnnnnnnnnnnnnnnnnnnnnnnnnnnnnnnnnnnnnnnnnnnnnnnnnnnnnnnnnnnnnnnnnnnnnnnnnnnnnnnnnnnnnnnnnnnnnnnnnnnnnnnnnnnnnnnnnnnnnnnnnnnnnnnnnnnnnnnnnnnnnnnnnnnnnnnnnnnnnnnnnnnnnnnnnnnnnnnnnnnnnnnnnnnnnnnnnnnnnnnnnnnnnnnnnnnnnnnnnnnnnnnnnnnnnnnnnnnnnnnnnnnnnnnnnnnnnnnnnnnnnnnnnnnnnnnnnnnnnnnnnnnnnnnnnnnnnnnnnnnnnnnnnnnnnnnnnnnnnnnnnnnnnnnnnnnnnnnnnnnnnnnnnnnnnnnnnnnnnnnnnnnnnnnnnnnnnnnnnnnnnnnnnnnnnnnnnnnnnnnnnnnnnnnnnnnnnnnnnnnnnnnnnnnnnnnnnnnnnnnnnnnnnnnnnnnnnnnnnnnnnnnnnnnnnnnnnnnnnnnnnnnnnnnnnnnnnnnnnnnnnnnnnnnnnnnnnnnnnnnnnnnnnnnnnnnnnnnnnnnnnnnnnnnnnnnnnnnnnnnnnnnnnnnnnnnnnnnnnnnnnnnnnnnnnnnnnnnnnnnnnnnnnnnnnnnnnnnnnnnnnnnnnnnnnnnnnnnnnnnnnnnnnnnnnnnnnnnnnnnnnnnnnnnnnnnnnnnnnnnnnnnnnnnnnnnnnnnnnnnnnnnnnnnnnnnnnnnnnnnnnnnnnnnnnnnnnnnnnnnnnnnnnnnnnnnnnnnnnnnnnnnnnnnnnnnnnnnnnnnnnnnnnnnnnnnnnnnnnnnnnnnnnnnnnnnnnnnnnnnnnnnnnnnnnnnnnnnnnnnnnnnnnnnnnnnnnnnnnnnnnnnnnnnnnnnnnnnnnnnnnnnnnnnnnnnnnnnnnnnnnnnnnnnnnnnnnnnnnnnnnnnnnnnnnnnnnnnnnnnnnnnnnnnnnnnnnnnnnnnnnnnnnnnnnnnnnnnnnnnnnnnnnnnnnnnnnnnnnnnnnnnnnnnnnnnnnnnnnnnnnnnnnnnnnnnnnnnnnnnnnnnnnnnnnnnnnnnnnnnnnnnnnnnnnnnnnnnnnnnnnnnnnnnnnnnnnnnnnnnnnnnnnnnnnnnnnnnnnnnnnnnnnnnnnnnnnnnnnnnnnnnnnnnnnnnnnnnnnnnnnnnnnnnnnnnnnnnnnnnnnnnnnnnnnnnnnnnnnnnnnnnnnnnnnnnnnnnnnnnnnnnnnnnnnnnnnnnnnnnnnnnnnnnnnnnnnnnnnnnnnnnnnnnnnnnnnnnnnnnnnnnnnnnnnnnnnnnnnnnnnnnnnnnnnnnnnnnnnnnnnnnnnnnnnnnnnnnnnnnnnnnnnnnnnnnnnnnnnnnnnnnnnnnnnnnnnnnnnnnnnnnnnnnnnnnnnnnnnnnnnnnnnnnnnnnnnnnnnnnnnnnnnnnnnnnnnnnnnnnnnnnnnnnnnnnnnnnnnnnnnnnnnnnnnnnnnnnnnnnnnnnnnnnnnnnnnnnnnnnnnnnnnnnnnnnnnnnnnnnnnnnnnnnnnnnnnnnnnnnnnnnnnnnnnnnnnnnnnnnnnnnnnnnnnnnnnnnnnnnnnnnnnnnnnnnnnnnnnnnnnnnnnnnnnnnnnnnnnnnnnnnnnnnnnnnnnnnnnnnnnnnnnnnnnnnnnnnnnnnnnnnnnnnnnnnnnnnnnnnnnnnnnnnnnnnnnnnnnnnnnnnnnnnnnnnnnnnnnnnnnnnnnnnnnnnnnnnnnnnnnnnnnnnnnnnnnnnnnnnnnnnnnnnnnnnnnnnnnnnnnnnnnnnnnnnnnnnnnnnnnnnnnnnnnnnnnnnnnnnnnnnnnnnnnnnnnnnnnnnnnnnnnnnnnnnnnnnnnnnnnnnnnnnnnnnnnnnnnnnnnnnnnnnnnnnnnnnnnnnnnnnnnnnnnnnnnnnnnnnnnnnnnnnnnnnnnnnnnnnnnnnnnnnnnnnnnnnnnnnnnnnnnnnnnnnnnnnnnnnnnnnnnnnnnnnnnnnnnnnnnnnnnnnnnnnnnnnnnnnnnnnnnnnnnnnnnnnnnnnnnnnnnnnnnnnnnnnnnnnnnnnnnnnnnnnnnnnnnnnnnnnnnnnnnnnnnnnnnnnnnnnnnnnnnnnnnnnnnnnnnnnnnnnnnnnnnnnnnnnnnnnnnnnnnnnnnnnnnnnnnnnnnnnnnnnnnnnnnnnnnnnnnnnnnnnnnnnnnnnnnnnnnnnnnnnnnnnnnnnnnnnnnnnnnnnnnnnnnnnnnnnnnnnnnnnnnnnnnnnnnnnnnnnnnnnnnnnnnnnnnnnnnnnnnnnnnnnnnnnnnnnnnnnnnnnnnnnnnnnnnnnnnnnnnnnnnnnnnnnnnnnnnnnnnnnnnnnnnnnnnnnnnnnnnnnnnnnnnnnnnnnnnnnnnnnnnnnnnnnnnnnnnnnnnnnnnnnnnnnnnnnnnnnnnnnnnnnnnnnnnnnnnnnnnnnnnnnnnnnnnnnnnnnnnnnnnnnnnnnnnnnnnnnnnnnnnnnnnnnnnnnnnnnnnnnnnnnnnnnnnnnnnnnnnnnnnnnnnnnnnnnnnnnnnnnnnnnnnnnnnnnnnnnnnnnnnnnnnnnnnnnnnnnnnnnnnnnnnnnnnnnnnnnnnnnnnnnnnnnnnnnnnnnnnnnnnnnnnnnnnnnnnnnnnnnnnnnnnnnnnnnnnnnnnnnnnnnnnnnnnnnnnnnnnnnnnnnnnnnnnnnnnnnnnnnnnnnnnnnnnnnnnnnnnnnnnnnnnnnnnnnnnnnnnnnnnnnnnnnnnnnnnnnnnnnnnnnnnnnnnnnnnnnnnnnnnnnnnnnnnnnnnnnnnnnnnnnnnnnnnnnnnnnnnnnnnnnnnnnnnnnnnnnnnnnnnnnnnnnnnnnnnnnnnnnnnnnnnnnnnnnnnnnnnnnnnnnnnnnnnnnnnnnnnnnnnnnnnnnnnnnnnnnnnnnnnnnnnnnnnnnnnnnnnnnnnnnnnnnnnnnnnnnnnnnnnnnnnnnnnnnnnnnnnnnnnnnnnnnnnnnnnnnnnnnnnnnnnnnnnnnnnnnnnnnnnnnnnnnnnnnnnnnnnnnnnnnnnnnnnnnnnnnnnnnnnnnnnnnnnnnnnnnnnnnnnnnnnnnnnnnnnnnnnnnnnnnnnnnnnnnnnnnnnnnnnnnnnnnnnnnnnnnnnnnnnnnnnnnnnnnnnnnnnnnnnnnnnnnnnnnnnnnnnnnnnnnnnnnnnnnnnnnnnnnnnnnnnnnnnnnnnnnnnnnnnnnnnnnnnnnnnnnnnnnnnnnnnnnnnnnnnnnnnnnnnnnnnnnnnnnnnnnnnnnnnnnnnnnnnnnnnnnnnnnnnnnnnnnnnnnnnnnnnnnnnnnnnnnnnnnnnnnnnnnnnnnnnnnnnnnnnnnnnnnnnnnnnnnnnnnnnnnnnnnnnnnnnnnnnnnnnnnnnnnnnnnnnnnnnnnnnnnnnnnnnnnnnnnnnnnnnnnnnnnnnnnnnnnnnnnnnnnnnnnnnnnnnnnnnnnnnnnnnnnnnnnnnnnnnnnnnnnnnnnnnnnnnnnnnnnnnnnnnnnnnnnnnnnnnnnnnnnnnnnnnnnnnnnnnnnnnnnnnnnnnnnnnnnnnnnnnnnnnnnnnnnnnnnnnnnnnnnnnnnnnnnnnnnnnnnnnnnnnnnnnnnnnnnnnnnnnnnnnnnnnnnnnnnnnnnnnnnnnnnnnnnnnnnnnnnnnnnnnnnnnnnnnnnnnnnnnnnnnnnnnnnnnnnnnnnnnnnnnnnnnnnnnnnnnnnnnnnnnnnnnnnnnnnnnnnnnnnnnnnnnnnnnnnnnnnnnnnnnnnnnnnnnnnnnnnnnnnnnnnnnnnnnnnnnnnnnnnnnnnnnnnnnnnnnnnnnnnnnnnnnnnnnnnnnnnnnnnnnnnnnnnnnnnnnnnnnnnnnnnnnnnnnnnnnnnnnnnnnnnnnnnnnnnnnnnnnnnnnnnnnnnnnnnnnnnnnnnnnnnnnnnnnnnnnnnnnnnnnnnnnnnnnnnnnnnnnnnnnnnnnnnnnnnnnnnnnnnnnnnnnnnnnnnnnnnnnnnnnnnnnnnnnnnnnnnnnnnnnnnnnnnnnnnnnnnnnnnnnnnnnnnnnnnnnnnnnnnnnnnnnnnnnnnnnnnnnnnnnnnnnnnnnnnnnnnnnnnnnnnnnnnnnnnnnnnnnnnnnnnnnnnnnnnnnnnnnnnnnnnnnnnnnnnnnnnnnnnnnnnnnnnnnnnnnnnnnnnnnnnnnnnnnnnnnnnnnnnnnnnnnnnnnnnnnnnnnnnnnnnnnnnnnnnnnnnnnnnnnnnnnnnnnnnnnnnnnnnnnnnnnnnnnnnnnnnnnnnnnnnnnnnnnnnnnnnnnnnnnnnnnnnnnnnnnnnnnnnnnnnnnnnnnnnnnnnnnnnnnnnnnnnnnnnnnnnnnnnnnnnnnnnnnnnnnnnnnnnnnnnnnnnnnnnnnnnnnnnnnnnnnnnnnnnnnnnnnnnnnnnnnnnnnnnnnnnnnnnnnnnnnnnnnnnnnnnnnnnnnnnnnnnnnnnnnnnnnnnnnnnnnnnnnnnnnnnnnnnnnnnnnnnnnnnnnnnnnnnnnnnnnnnnnnnnnnnnnnnnnnnnnnnnnnnnnnnnnnnnnnnnnnnnnnnnnnnnnnnnnnnnnnnnnnnnnnnnnnnnnnnnnnnnnnnnnnnnnnnnnnnnnnnnnnnnnnnnnnnnnnnnnnnnnnnnnnnnnnnnnnnnnnnnnnnnnnnnnnnnnnnnnnnnnnnnnnnnnnnnnnnnnnnnnnnnnnnnnnnnnnnnnnnnnnnnnnnnnnnnnnnnnnnnnnnnnnnnnnnnnnnnnnnnnnnnnnnnnnnnnnnnnnnnnnnnnnnnnnnnnnnnnnnnnnnnnnnnnnnnnnnnnnnnnnnnnnnnnnnnnnnnnnnnnnnnnnnnnnnnnnnnnnnnnnnnnnnnnnnnnnnnnnnnnnnnnnnnnnnnnnnnnnnnnnnnnnnnnnnnnnnnnnnnnnnnnnnnnnnnnnnnnnnnnnnnnnnnnnnnnnnnnnnnnnnnnnnnnnnnnnnnnnnnnnnnnnnnnnnnnnnnnnnnnnnnnnnnnnnnnnnnnnnnnnnnnnnnnnnnnnnnnnnnnnnnnnnnnnnnnnnnnnnnnnnnnnnnnnnnnnnnnnnnnnnnnnnnnnnnnnnnnnnnnnnnnnnnnnnnnnnnnnnnnnnnnnnnnnnnnnnnnnnnnnnnnnnnnnnnnnnnnnnnnnnnnnnnnnnnnnnnnnnnnnnnnnnnnnnnnnnnnnnnnnnnnnnnnnnnnnnnnnnnnnnnnnnnnnnnnnnnnnnnnnnnnnnnnnnnnnnnnnnnnnnnnnnnnnnnnnnnnnnnnnnnnnnnnnnnnnnnnnnnnnnnnnnnnnnnnnnnnnnnnnnnnnnnnnnnnnnnnnnnnnnnnnnnnnnnnnnnnnnnnnnnnnnnnnnnnnnnnnnnnnnnnnnnnnnnnnnnnnnnnnnnnnnnnnnnnnnnnnnnnnnnnnnnnnnnnnnnnnnnnnnnnnnnnnnnnnnnnnnnnnnnnnnnnnnnnnnnnnnnnnnnnnnnnnnnnnnnnnnnnnnnnnnnnnnnnnnnnnnnnnnnnnnnnnnnnnnnnnnnnnnnnnnnnnnnnnnnnnnnnnnnnnnnnnnnnnnnnnnnnnnnnnnnnnnnnnnnnnnnnnnnnnnnnnnnnnnnnnnnnnnnnnnnnnnnnnnnnnnnnnnnnnnnnnnnnnnnnnnnnnnnnnnnnnnnnnnnnnnnnnnnnnnnnnnnnnnnnnnnnnnnnnnnnnnnnnnnnnnnnnnnnnnnnnnnnnnnnnnnnnnnnnnnnnnnnnnnnnnnnnnnnnnnnnnnnnnnnnnnnnnnnnnnnnnnnnnnnnnnnnnnnnnnnnnnnnnnnnnnnnnnnnnnnnnnnnnnnnnnnnnnnnnnnnnnnnnnnnnnnnnnnnnnnnnnnnnnnnnnnnnnnnnnnnnnnnnnnnnnnnnnnnnnnnnnnnnnnnnnnnnnnnnnnnnnnnnnnnnnnnnnnnnnnnnnnnnnnnnnnnnnnnnnnnnnnnnnnnnnnnnnnnnnnnnnnnnnnnnnnnnnnnnnnnnnnnnnnnnnnnnnnnnnnnnnnnnnnnnnnnnnnnnnnnnnnnnnnnnnnnnnnnnnnnnnnnnnnnnnnnnnnnnnnnnnnnnnnnnnnnnnnnnnnnnnnnnnnnnnnnnnnnnnnnnnnnnnnnnnnnnnnnnnnnnnnnnnnnnnnnnnnnnnnnnnnnnnnnnnnnnnnnnnnnnnnnnnnnnnnnnnnnnnnnnnnnnnnnnnnnnnnnnnnnnnnnnnnnnnnnnnnnnnnnnnnnnnnnnnnnnnnnnnnnnnnnnnnnnnnnnnnnnnnnnnnnnnnnnnnnnnnnnnnnnnnnnnnnnnnnnnnnnnnnnnnnnnnnnnnnnnnnnnnnnnnnnnnnnnnnnnnnnnnnnnnnnnnnnnnnnnnnnnnnnnnnnnnnnnnnnnnnnnnnnnnnnnnnnnnnnnnnnnnnnnnnnnnnnnnnnnnnnnnnnnnnnnnnnnnnnnnnnnnnnnnnnnnnnnnnnnnnnnnnnnnnnnnnnnnnnnnnnnnnnnnnnnnnnnnnnnnnnnnnnnnnnnnnnnnnnnnnnnnnnnnnnnnnnnnnnnnnnnnnnnnnnnnnnnnnnnnnnnnnnnnnnnnnnnnnnnnnnnnnnnnnnnnnnnnnnnnnnnnnnnnnnnnnnnnnnnnnnnnnnnnnnnnnnnnnnnnnnnnnnnnnnnnnnnnnnnnnnnnnnnnnnnnnnnnnnnnnnnnnnnnnnnnnnnnnnnnnnnnnnnnnnnnnnnnnnnnnnnnnnnnnnnnnnnnnnnnnnnnnnnnnnnnnnnnnnnnnnnnnnnnnnnnnnnnnnnnnnnnnnnnnnnnnnnnnnnnnnnnnnnnnnnnnnnnnnnnnnnnnnnnnnnnnnnnnnnnnnnnnnnnnnnnnnnnnnnnnnnnnnnnnnnnnnnnnnnnnnnnnnnnnnnnnnnnnnnnnnnnnnnnnnnnnnnnnnnnnnnnnnnnnnnnnnnnnnnnnnnnnnnnnnnnnnnnnnnnnnnnnnnnnnnnnnnnnnnnnnnnnnnnnnnnnnnnnnnnnnnnnnnnnnnnnnnnnnnnnnnnnnnnnnnnnnnnnnnnnnnnnnnnnnnnnnnnnnnnnnnnnnnnnnnnnnnnnnnnnnnnnnnnnnnnnnnnnnnnnnnnnnnnnnnnnnnnnnnnnnnnnnnnnnnnnnnnnnnnnnnnnnnnnnnnnnnnnnnnnnnnnnnnnnnnnnnnnnnnnnnnnnnnnnnnnnnnnnnnnnnnnnnnnnnnnnnnnnnnnnnnnnnnnnnnnnnnnnnnnnnnnnnnnnnnnnnnnnnnnnnnnnnnnnnnnnnnnnnnnnnnnnnnnnnnnnnnnnnnnnnnnnnnnnnnnnnnnnnnnnnnnnnnnnnnnnnnnnnnnnnnnnnnnnnnnnnnnnnnnnnnnnnnnnnnnnnnnnnnnnnnnnnnnnnnnnnnnnnnnnnnnnnnnnnnnnnnnnnnnnnnnnnnnnnnnnnnnnnnnnnnnnnnnnnnnnnnnnnnnnnnnnnnnnnnnnnnnnnnnnnnnnnnnnnnnnnnnnnnnnnnnnnnnnnnnnnnnnnnnnnnnnnnnnnnnnnnnnnnnnnnnnnnnnnnnnnnnnnnnnnnnnnnnnnnnnnnnnnnnnnnnnnnnnnnnnnnnnnnnnnnnnnnnnnnnnnnnnnnnnnnnnnnnnnnnnnnnnnnnnnnnnnnnnnnnnnnnnnnnnnnnnnnnnnnnnnnnnnnnnnnnnnnnnnnnnnnnnnnnnnnnnnnnnnnnnnnnnnnnnnnnnnnnnnnnnnnnnnnnnnnnnnnnnnnnnnnnnnnnnnnnnnnnnnnnnnnnnnnnnnnnnnnnnnnnnnnnnnnnnnnnnnnnnnnnnnnnnnnnnnnnnnnnnnnnnnnnnnnnnnnnnnnnnnnnnnnnnnnnnnnnnnnnnnnnnnnnnnnnnnnnnnnnnnnnnnnnnnnnnnnnnnnnnnnnnnnnnnnnnnnnnnnnnnnnnnnnnnnnnnnnnnnnnnnnnnnnnnnnnnnnnnnnnnnnnnnnnnnnnnnnnnnnnnnnnnnnnnnnnnnnnnnnnnnnnnnnnnnnnnnnnnnnnnnnnnnnnnnnnnnnnnnnnnnnnnnnnnnnnnnnnnnnnnnnnnnnnnnnnnnnnnnnnnnnnnnnnnnnnnnnnnnnnnnnnnnnnnnnnnnnnnnnnnnnnnnnnnnnnnnnnnnnnnnnnnnnnnnnnnnnnnnnnnnnnnnnnnnnnnnnnnnnnnnnnnnnnnnnnnnnnnnnnnnnnnnnnnnnnnnnnnnnnnnnnnnnnnnnnnnnnnnnnnnnnnnnnnnnnnnnnnnnnnnnnnnnnnnnnnnnnnnnnnnnnnnnnnnnnnnnnnnnnnnnnnnnnnnnnnnnnnnnnnnnnnnnnnnnnnnnnnnnnnnnnnnnnnnnnnnnnnnnnnnnnnnnnnnnnnnnnnnnnnnnnnnnnnnnnnnnnnnnnnnnnnnnnnnnnnnnnnnnnnnnnnnnnnnnnnnnnnnnnnnnnnnnnnnnnnnnnnnnnnnnnnnnnnnnnnnnnnnnnnnnnnnnnnnnnnnnnnnnnnnnnnnnnnnnnnnnnnnnnnnnnnnnnnnnnnnnnnnnnnnnnnnnnnnnnnnnnnnnnnnnnnnnnnnnnnnnnnnnnnnnnnnnnnnnnnnnnnnnnnnnnnnnnnnnnnnnnnnnnnnnnnnnnnnnnnnnnnnnnnnnnnnnnnnnnnnnnnnnnnnnnnnnnnnnnnnnnnnnnnnnnnnnnnnnnnnnnnnnnnnnnnnnnnnnnnnnnnnnnnnnnnnnnnnnnnnnnnnnnnnnnnnnnnnnnnnnnnnnnnnnnnnnnnnnnnnnnnnnnnnnnnnnnnnnnnnnnnnnnnnnnnnnnnnnnnnnnnnnnnnnnnnnnnnnnnnnnnnnnnnnnnnnnnnnnnnnnnnnnnnnnnnnnnnnnnnnnnnnnnnnnnnnnnnnnnnnnnnnnnnnnnnnnnnnnnnnnnnnnnnnnnnnnnnnnnnnnnnnnnnnnnnnnnnnnnnnnnnnnnnnnnnnnnnnnnnnnnnnnnnnnnnnnnnnnnnnnnnnnnnnnnnnnnnnnnnnnnnnnnnnnnnnnnnnnnnnnnnnnnnnnnnnnnnnnnnnnnnnnnnnnnnnnnnnnnnnnnnnnnnnnnnnnnnnnnnnnnnnnnnnnnnnnnnnnnnnnnnnnnnnnnnnnnnnnnnnnnnnnnnnnnnnnnnnnnnnnnnnnnnnnnnnnnnnnnnnnnnnnnnnnnnnnnnnnnnnnnnnnnnnnnnnnnnnnnnnnnnnnnnnnnnnnnnnnnnnnnnnnnnnnnnnnnnnnnnnnnnnnnnnnnnnnnnnnnnnnnnnnnnnnnnnnnnnnnnnnnnnnnnnnnnnnnnnnnnnnnnnnnnnnnnnnnnnnnnnnnnnnnnnnnnnnnnnnnnnnnnnnnnnnnnnnnnnnnnnnnnnnnnnnnnnnnnnnnnnnnnnnnnnnnnnnnnnnnnnnnnnnnnnnnnnnnnnnnnnnnnnnnnnnnnnnnnnnnnnnnnnnnnnnnnnnnnnnnnnnnnnnnnnnnnnnnnnnnnnnnnnnnnnnnnnnnnnnnnnnnnnnnnnnnnnnnnnnnnnnnnnnnnnnnnnnnnnnnnnnnnnnnnnnnnnnnnnnnnnnnnnnnnnnnnnnnnnnnnnnnnnnnnnnnnnnnnnnnnnnnnnnnnnnnnnnnnnnnnnnnnnnnnnnnnnnnnnnnnnnnnnnnnnnnnnnnnnnnnnnnnnnnnnnnnnnnnnnnnnnnnnnnnnnnnnnnnnnnnnnnnnnnnnnnnnnnnnnnnnnnnnnnnnnnnnnnnnnnnnnnnnnnnnnnnnnnnnnnnnnnnnnnnnnnnnnnnnnnnnnnnnnnnnnnnnnnnnnnnnnnnnnnnnnnnnnnnnnnnnnnnnnnnnnnnnnnnnnnnnnnnnnnnnnnnnnnnnnnnnnnnnnnnnnnnnnnnnnnnnnnnnnnnnnnnnnnnnnnnnnnnnnnnnnnnnnnnnnnnnnnnnnnnnnnnnnnnnnnnnnnnnnnnnnnnnnnnnnnnnnnnnnnnnnnnnnnnnnnnnnnnnnnnnnnnnnnnnnnnnnnnnnnnnnnnnnnnnnnnnnnnnnnnnnnnnnnnnnnnnnnnnnnnnnnnnnnnnnnnnnnnnnnnnnnnnnnnnnnnnnnnnnnnnnnnnnnnnnnnnnnnnnnnnnnnnnnnnnnnnnnnnnnnnnnnnnnnnnnnnnnnnnnnnnnnnnnnnnnnnnnnnnnnnnnnnnnnnnnnnnnnnnnnnnnnnnnnnnnnnnnnnnnnnnnnnnnnnnnnnnnnnnnnnnnnnnnnnnnnnnnnnnnnnnnnnnnnnnnnnnnnnnnnnnnnnnnnnnnnnnnnnnnnnnnnnnnnnnnnnnnnnnnnnnnnnnnnnnnnnnnnnnnnnnnnnnnnnnnnnnnnnnnnnnnnnnnnnnnnnnnnnnnnnnnnnnnnnnnnnnnnnnnnnnnnnnnnnnnnnnnnnnnnnnnnnnnnnnnnnnnnnnnnnnnnnnnnnnnnnnnnnnnnnnnnnnnnnnnnnnnnnnnnnnnnnnnnnnnnnnnnnnnnnnnnnnnnnnnnnnnnnnnnnnnnnnnnnnnnnnnnnnnnnnnnnnnnnnnnnnnnnnnnnnnnnnnnnnnnnnnnnnnnnnnnnnnnnnnnnnnnnnnnnnnnnnnnnnnnnnnnnnnnnnnnnnnnnnnnnnnnnnnnnnnnnnnnnnnnnnnnnnnnnnnnnnnnnnnnnnnnnnnnnnnnnnnnnnnnnnnnnnnnnnnnnnnnnnnnnnnnnnnnnnnnnnnnnnnnnnnnnnnnnnnnnnnnnnnnnnnnnnnnnnnnnnnnnnnnnnnnnnnnnnnnnnnnnnnnnnnnnnnnnnnnnnnnnnnnnnnnnnnnnnnnnnnnnnnnnnnnnnnnnnnnnnnnnnnnnnnnnnnnnnnnnnnnnnnnnnnnnnnnnnnnnnnnnnnnnnnnnnnnnnnnnnnnnnnnnnnnnnnnnnnnnnnnnnnnnnnnnnnnnnnnnnnnnnnnnnnnnnnnnnnnnnnnnnnnnnnnnnnnnnnnnnnnnnnnnnnnnnnnnnnnnnnnnnnnnnnnnnnnnnnnnnnnnnnnnnnnnnnnnnnnnnnnnnnnnnnnnnnnnnnnnnnnnnnnnnnnnnnnnnnnnnnnnnnnnnnnnnnnnnnnnnnnnnnnnnnnnnnnnnnnnnnnnnnnnnnnnnnnnnnnnnnnnnnnnnnnnnnnnnnnnnnnnnnnnnnnnnnnnnnnnnnnnnnnnnnnnnnnnnnnnnnnnnnnnnnnnnnnnnnnnnnnnnnnnnnnnnnnnnnnnnnnnnnnnnnnnnnnnnnnnnnnnnnnnnnnnnnnnnnnnnnnnnnnnnnnnnnnnnnnnnnnnnnnnnnnnnnnnnnnnnnnnnnnnnnnnnnnnnnnnnnnnnnnnnnnnnnnnnnnnnnnnnnnnnnnnnnnnnnnnnnnnnnnnnnnnnnnnnnnnnnnnnnnnnnnnnnnnnnnnnnnnnnnnnnnnnnnnnnnnnnnnnnnnnnnnnnnnnnnnnnnnnnnnnnnnnnnnnnnnnnnnnnnnnnnnnnnnnnnnnnnnnnnnnnnnnnnnnnnnnnnnnnnnnnnnnnnnnnnnnnnnnnnnnnnnnnnnnnnnnnnnnnnnnnnnnnnnnnnnnnnnnnnnnnnnnnnnnnnnnnnnnnnnnnnnnnnnnnnnnnnnnnnnnnnnnnnnnnnnnnnnnnnnnnnnnnnnnnnnnnnnnnnnnnnnnnnnnnnnnnnnnnnnnnnnnnnnnnnnnnnnnnnnnnnnnnnnnnnnnnnnnnnnnnnnnnnnnnnnnnnnnnnnnnnnnnnnnnnnnnnnnnnnnnnnnnnnnnnnnnnnnnnnnnnnnnnnnnnnnnnnnnnnnnnnnnnnnnnnnnnnnnnnnnnnnnnnnnnnnnnnnnnnnnnnnnnnnnnnnnnnnnnnnnnnnnnnnnnnnnnnnnnnnnnnnnnnnnnnnnnnnnnnnnnnnnnnnnnnnnnnnnnnnnnnnnnnnnnnnnnnnnnnnnnnnnnnnnnnnnnnnnnnnnnnnnnnnnnnnnnnnnnnnnnnnnnnnnnnnnnnnnnnnnnnnnnnnnnnnnnnnnnnnnnnnnnnnnnnnnnnnnnnnnnnnnnnnnnnnnnnnnnnnnnnnnnnnnnnnnnnnnnnnnnnnnnnnnnnnnnnnnnnnnnnnnnnnnnnnnnnnnnnnnnnnnnnnnnnnnnnnnnnnnnnnnnnnnnnnnnnnnnnnnnnnnnnnnnnnnnnnnnnnnnnnnnnnnnnnnnnnnnnnnnnnnnnnnnnnnnnnnnnnnnnnnnnnnnnnnnnnnnnnnnnnnnnnnnnnnnnnnnnnnnnnnnnnnnnnnnnnnnnnnnnnnnnnnnnnnnnnnnnnnnnnnnnnnnnnnnnnnnnnnnnnnnnnnnnnnnnnnnnnnnnnnnnnnnnnnnnnnnnnnnnnnnnnnnnnnnnnnnnnnnnnnnnnnnnnnnnnnnnnnnnnnnnnnnnnnnnnnnnnnnnnnnnnnnnnnnnnnnnnnnnnnnnnnnnnnnnnnnnnnnnnnnnnnnnnnnnnnnnnnnnnnnnnnnnnnnnnnnnnnnnnnnnnnnnnnnnnnnnnnnnnnnnnnnnnnnnnnnnnnnnnnnnnnnnnnnnnnnnnnnnnnnnnnnnnnnnnnnnnnnnnnnnnnnnnnnnnnnnnnnnnnnnnnnnnnnnnnnnnnnnnnnnnnnnnnnnnnnnnnnnnnnnnnnnnnnnnnnnnnnnnnnnnnnnnnnnnnnnnnnnnnnnnnnnnnnnnnnnnnnnnnnnnnnnnnnnnnnnnnnnnnnnnnnnnnnnnnnnnnnnnnnnnnnnnnnnnnnnnnnnnnnnnnnnnnnnnnnnnnnnnnnnnnnnnnnnnnnnnnnnnnnnnnnnnnnnnnnnnnnnnnnnnnnnnnnnnnnnnnnnnnnnnnnnnnnnnnnnnnnnnnnnnnnnnnnnnnnnnnnnnnnnnnnnnnnnnnnnnnnnnnnnnnnnnnnnnnnnnnnnnnnnnnnnnnnnnnnnnnnnnnnnnnnnnnnnnnnnnnnnnnnnnnnnnnnnnnnnnnnnnnnnnnnnnnnnnnnnnnnnnnnnnnnnnnnnnnnnnnnnnnnnnnnnnnnnnnnnnnnnnnnnnnnnnnnnnnnnnnnnnnnnnnnnnnnnnnnnnnnnnnnnnnnnnnnnnnnnnnnnnnnnnnnnnnnnnnnnnnnnnnnnnnnnnnnnnnnnnnnnnnnnnnnnnnnnnnnnnnnnnnnnnnnnnnnnnnnnnnnnnnnnnnnnnnnnnnnnnnnnnnnnnnnnnnnnnnnnnnnnnnnnnnnnnnnnnnnnnnnnnnnnnnnnnnnnnnnnnnnnnnnnnnnnnnnnnnnnnnnnnnnnnnnnnnnnnnnnnnnnnnnnnnnnnnnnnnnnnnnnnnnnnnnnnnnnnnnnnnnnnnnnnnnnnnnnnnnnnnnnnnnnnnnnnnnnnnnnnnnnnnnnnnnnnnnnnnnnnnnnnnnnnnnnnnnnnnnnnnnnnnnnnnnnnnnnnnnnnnnnnnnnnnnnnnnnnnnnnnnnnnnnnnnnnnnnnnnnnnnnnnnnnnnnnnnnnnnnnnnnnnnnnnnnnnnnnnnnnnnnnnnnnnnnnnnnnnnnnnnnnnnnnnnnnnnnnnnnnnnnnnnnnnnnnnnnnnnnnnnnnnnnnnnnnnnnnnnnnnnnnnnnnnnnnnnnnnnnnnnnnnnnnnnnnnnnnnnnnnnnnnnnnnnnnnnnnnnnnnnnnnnnnnnnnnnnnnnnnnnnnnnnnnnnnnnnnnnnnnnnnnnnnnnnnnnnnnnnnnnnnnnnnnnnnnnnnnnnnnnnnnnnnnnnnnnnnnnnnnnnnnnnnnnnnnnnnnnnnnnnnnnnnnnnnnnnnnnnnnnnnnnnnnnnnnnnnnnnnnnnnnnnnnnnnnnnnnnnnnnnnnnnnnnnnnnnnnnnnnnnnnnnnnnnnnnnnnnnnnnnnnnnnnnnnnnnnnnnnnnnnnnnnnnnnnnnnnnnnnnnnnnnnnnnnnnnnnnnnnnnnnnnnnnnnnnnnnnnnnnnnnnnnnnnnnnnnnnnnnnnnnnnnnnnnnnnnnnnnnnnnnnnnnnnnnnnnnnnnnnnnnnnnnnnnnnnnnnnnnnnnnnnnnnnnnnnnnnnnnnnnnnnnnnnnnnnnnnnnnnnnnnnnnnnnnnnnnnnnnnnnnnnnnnnnnnnnnnnnnnnnnnnnnnnnnnnnnnnnnnnnnnnnnnnnnnnnnnnnnnnnnnnnnnnnnnnnnnnnnnnnnnnnnnnnnnnnnnnnnnnnnnnnnnnnnnnnnnnnnnnnnnnnnnnnnnnnnnnnnnnnnnnnnnnnnnnnnnnnnnnnnnnnnnnnnnnnnnnnnnnnnnnnnnnnnnnnnnnnnnnnnnnnnnnnnnnnnnnnnnnnnnnnnnnnnnnnnnnnnnnnnnnnnnnnnnnnnnnnnnnnnnnnnnnnnnnnnnnnnnnnnnnnnnnnnnnnnnnnnnnnnnnnnnnnnnnnnnnnnnnnnnnnnnnnnnnnnnnnnnnnnnnnnnnnnnnnnnnnnnnnnnnnnnnnnnnnnnnnnnnnnnnnnnnnnnnnnnnnnnnnnnnnnnnnnnnnnnnnnnnnnnnnnnnnnnnnnnnnnnnnnnnnnnnnnnnnnnnnnnnnnnnnnnnnnnnnnnnnnnnnnnnnnnnnnnnnnnnnnnnnnnnnnnnnnnnnnnnnnnnnnnnnnnnnnnnnnnnnnnnnnnnnnnnnnnnnnnnnnnnnnnnnnnnnnnnnnnnnnnnnnnnnnnnnnnnnnnnnnnnnnnnnnnnnnnnnnnnnnnnnnnnnnnnnnnnnnnnnnnnnnnnnnnnnnnnnnnnnnnnnnnnnnnnnnnnnnnnnnnnnnnnnnnnnnnnnnnnnnnnnnnnnnnnnnnnnnnnnnnnnnnnnnnnnnnnnnnnnnnnnnnnnnnnnnnnnnnnnnnnnnnnnnnnnnnnnnnnnnnnnnnnnnnnnnnnnnnnnnnnnnnnnnnnnnnnnnnnnnnnnnnnnnnnnnnnnnnnnnnnnnnnnnnnnnnnnnnnnnnnnnnnnnnnnnnnnnnnnnnnnnnnnnnnnnnnnnnnnnnnnnnnnnnnnnnnnnnnnnnnnnnnnnnnnnnnnnnnnnnnnnnnnnnnnnnnnnnnnnnnnnnnnnnnnnnnnnnnnnnnnnnnnnnnnnnnnnnnnnnnnnnnnnnnnnnnnnnnnnnnnnnnnnnnnnnnnnnnnnnnnnnnnnnnnnnnnnnnnnnnnnnnnnnnnnnnnnnnnnnnnnnnnnnnnnnnnnnnnnnnnnnnnnnnnnnnnnnnnnnnnnnnnnnnnnnnnnnnnnnnnnnnnnnnnnnnnnnnnnnnnnnnnnnnnnnnnnnnnnnnnnnnnnnnnnnnnnnnnnnnnnnnnnnnnnnnnnnnnnnnnnnnnnnnnnnnnnnnnnnnnnnnnnnnnnnnnnnnnnnnnnnnnnnnnnnnnnnnnnnnnnnnnnnnnnnnnnnnnnnnnnnnnnnnnnnnnnnnnnnnnnnnnnnnnnnnnnnnnnnnnnnnnnnnnnnnnnnnnnnnnnnnnnnnnnnnnnnnnnnnnnnnnnnnnnnnnnnnnnnnnnnnnnnnnnnnnnnnnnnnnnnnnnnnnnnnnnnnnnnnnnnnnnnnnnnnnnnnnnnnnnnnnnnnnnnnnnnnnnnnnnnnnnnnnnnnnnnnnnnnnnnnnnnnnnnnnnnnnnnnnnnnnnnnnnnnnnnnnnnnnnnnnnnnnnnnnnnnnnnnnnnnnnnnnnnnnnnnnnnnnnnnnnnnnnnnnnnnnnnnnnnnnnnnnnnnnnnnnnnnnnnnnnnnnnnnnnnnnnnnnnnnnnnnnnnnnnnnnnnnnnnnnnnnnnnnnnnnnnnnnnnnnnnnnnnnnnnnnnnnnnnnnnnnnnnnnnnnnnnnnnnnnnnnnnnnnnnnnnnnnnnnnnnnnnnnnnnnnnnnnnnnnnnnnnnnnnnnnnnnnnnnnnnnnnnnnnnnnnnnnnnnnnnnnnnnnnnnnnnnnnnnnnnnnnnnnnnnnnnnnnnnnnnnnnnnnnnnnnnnnnnnnnnnnnnnnnnnnnnnnnnnnnnnnnnnnnnnnnnnnnnnnnnnnnnnnnnnnnnnnnnnnnnnnnnnnnnnnnnnnnnnnnnnnnnnnnnnnnnnnnnnnnnnnnnnnnnnnnnnnnnnnnnnnnnnnnnnnnnnnnnnnnnnnnnnnnnnnnnnnnnnnnnnnnnnnnnnnnnnnnnnnnnnnnnnnnnnnnnnnnnnnnnnnnnnnnnnnnnnnnnnnnnnnnnnnnnnnnnnnnnnnnnnnnnnnnnnnnnnnnnnnnnnnnnnnnnnnnnnnnnnnnnnnnnnnnnnnnnnnnnnnnnnnnnnnnnnnnnnnnnnnnnnnnnnnnnnnnnnnnnnnnnnnnnnnnnnnnnnnnnnnnnnnnnnnnnnnnnnnnnnnnnnnnnnnnnnnnnnnnnnnnnnnnnnnnnnnnnnnnnnnnnnnnnnnnnnnnnnnnnnnnnnnnnnnnnnnnnnnnnnnnnnnnnnnnnnnnnnnnnnnnnnnnnnnnnnnnnnnnnnnnnnnnnnnnnnnnnnnnnnnnnnnnnnnnnnnnnnnnnnnnnnnnnnnnnnnnnnnnnnnnnnnnnnnnnnnnnnnnnnnnnnnnnnnnnnnnnnnnnnnnnnnnnnnnnnnnnnnnnnnnnnnnnnnnnnnnnnnnnnnnnnnnnnnnnnnnnnnnnnnnnnnnnnnnnnnnnnnnnnnnnnnnnnnnnnnnnnnnnnnnnnnnnnnnnnnnnnnnnnnnnnnnnnnnnnnnnnnnnnnnnnnnnnnnnnnnnnnnnnnnnnnnnnnnnnnnnnnnnnnnnnnnnnnnnnnnnnnnnnnnnnnnnnnnnnnnnnnnnnnnnnnnnnnnnnnnnnnnnnnnnnnnnnnnnnnnnnnnnnnnnnnnnnnnnnnnnnnnnnnnnnnnnnnnnnnnnnnnnnnnnnnnnnnnnnnnnnnnnnnnnnnnnnnnnnnnnnnnnnnnnnnnnnnnnnnnnnnnnnnnnnnnnnnnnnnnnnnnnnnnnnnnnnnnnnnnnnnnnnnnnnnnnnnnnnnnnnnnnnnnnnnnnnnnnnnnnnnnnnnnnnnnnnnnnnnnnnnnnnnnnnnnnnnnnnnnnnnnnnnnnnnnnnnnnnnnnnnnnnnnnnnnnnnnnnnnnnnnnnnnnnnnnnnnnnnnnnnnnnnnnnnnnnnnnnnnnnnnnnnnnnnnnnnnnnnnnnnnnnnnnnnnnnnnnnnnnnnnnnnnnnnnnnnnnnnnnnnnnnnnnnnnnnnnnnnnnnnnnnnnnnnnnnnnnnnnnnnnnnnnnnnnnnnnnnnnnnnnnnnnnnnnnnnnnnnnnnnnnnnnnnnnnnnnnnnnnnnnnnnnnnnnnnnnnnnnnnnnnnnnnnnnnnnnnnnnnnnnnnnnnnnnnnnnnnnnnnnnnnnnnnnnnnnnnnnnnnnnnnnnnnnnnnnnnnnnnnnnnnnnnnnnnnnnnnnnnnnnnnnnnnnnnnnnnnnnnnnnnnnnnnnnnnnnnnnnnnnnnnnnnnnnnnnnnnnnnnnnnnnnnnnnnnnnnnnnnnnnnnnnnnnnnnnnnnnnnnnnnnnnnnnnnnnnnnnnnnnnnnnnnnnnnnnnnnnnnnnnnnnnnnnnnnnnnnnnnnnnnnnnnnnnnnnnnnnnnnnnnnnnnnnnnnnnnnnnnnnnnnnnnnnnnnnnnnnnnnnnnnnnnnnnnnnnnnnnnnnnnnnnnnnnnnnnnnnnnnnnnnnnnnnnnnnnnnnnnnnnnnnnnnnnnnnnnnnnnnnnnnnnnnnnnnnnnnnnnnnnnnnnnnnnnnnnnnnnnnnnnnnnnnnnnnnnnnnnnnnnnnnnnnnnnnnnnnnnnnnnnnnnnnnnnnnnnnnnnnnnnnnnnnnnnnnnnnnnnnnnnnnnnnnnnnnnnnnnnnnnnnnnnnnnnnnnnnnnnnnnnnnnnnnnnnnnnnnnnnnnnnnnnnnnnnnnnnnnnnnnnnnnnnnnnnnnnnnnnnnnnnnnnnnnnnnnnnnnnnnnnnnnnnnnnnnnnnnnnnnnnnnnnnnnnnnnnnnnnnnnnnnnnnnnnnnnnnnnnnnnnnnnnnnnnnnnnnnnnnnnnnnnnnnnnnnnnnnnnnnnnnnnnnnnnnnnnnnnnnnnnnnnnnnnnnnnnnnnnnnnnnnnnnnnnnnnnnnnnnnnnnnnnnnnnnnnnnnnnnnnnnnnnnnnnnnnnnnnnnnnnnnnnnnnnnnnnnnnnnnnnnnnnnnnnnnnnnnnnnnnnnnnnnnnnnnnnnnnnnnnnnnnnnnnnnnnnnnnnnnnnnnnnnnnnnnnnnnnnnnnnnnnnnnnnnnnnnnnnnnnnnnnnnnnnnnnnnnnnnnnnnnnnnnnnnnnnnnnnnnnnnnnnnnnnnnnnnnnnnnnnnnnnnnnnnnnnnnnnnnnnnnnnnnnnnnnnnnnnnnnnnnnnnnnnnnnnnnnnnnnnnnnnnnnnnnnnnnnnnnnnnnnnnnnnnnnnnnnnnnnnnnnnnnnnnnnnnnnnnnnnnnnnnnnnnnnnnnnnnnnnnnnnnnnnnnnnnnnnnnnnnnnnnnnnnnnnnnnnnnnnnnnnnnnnnnnnnnnnnnnnnnnnnnnnnnnnnnnnnnnnnnnnnnnnnnnnnnnnnnnnnnnnnnnnnnnnnnnnnnnnnnnnnnnnnnnnnnnnnnnnnnnnnnnnnnnnnnnnnnnnnnnnnnnnnnnnnnnnnnnnnnnnnnnnnnnnnnnnnnnnnnnnnnnnnnnnnnnnnnnnnnnnnnnnnnnnnnnnnnnnnnnnnnnnnnnnnnnnnnnnnnnnnnnnnnnnnnnnnnnnnnnnnnnnnnnnnnnnnnnnnnnnnnnnnnnnnnnnnnnnnnnnnnnnnnnnnnnnnnnnnnnnnnnnnnnnnnnnnnnnnnnnnnnnnnnnnnnnnnnnnnnnnnnnnnnnnnnnnnnnnnnnnnnnnnnnnnnnnnnnnnnnnnnnnnnnnnnnnnnnnnnnnnnnnnnnnnnnnnnnnnnnnnnnnnnnnnnnnnnnnnnnnnnnnnnnnnnnnnnnnnnnnnnnnnnnnnnnnnnnnnnnnnnnnnnnnnnnnnnnnnnnnnnnnnnnnnnnnnnnnnnnnnnnnnnnnnnnnnnnnnnnnnnnnnnnnnnnnnnnnnnnnnnnnnnnnnnnnnnnnnnnnnnnnnnnnnnnnnnnnnnnnnnnnnnnnnnnnnnnnnnnnnnnnnnnnnnnnnnnnnnnnnnnnnnnnnnnnnnnnnnnnnnnnnnnnnnnnnnnnnnnnnnnnnnnnnnnnnnnnnnnnnnnnnnnnnnnnnnnnnnnnnnnnnnnnnnnnnnnnnnnnnnnnnnnnnnnnnnnnnnnnnnnnnnnnnnnnnnnnnnnnnnnnnnnnnnnnnnnnnnnnnnnnnnnnnnnnnnnnnnnnnnnnnnnnnnnnnnnnnnnnnnnnnnnnnnnnnnnnnnnnnnnnnnnnnnnnnnnnnnnnnnnnnnnnnnnnnnnnnnnnnnnnnnnnnnnnnnnnnnnnnnnnnnnnnnnnnnnnnnnnnnnnnnnnnnnnnnnnnnnnnnnnnnnnnnnnnnnnnnnnnnnnnnnnnnnnnnnnnnnnnnnnnnnnnnnnnnnnnnnnnnnnnnnnnnnnnnnnnnnnnnnnnnnnnnnnnnnnnnnnnnnnnnnnnnnnnnnnnnnnnnnnnnnnnnnnnnnnnnnnnnnnnnnnnnnnnnnnnnnnnnnnnnnnnnnnnnnnnnnnnnnnnnnnnnnnnnnnnnnnnnnnnnnnnnnnnnnnnnnnnnnnnnnnnnnnnnnnnnnnnnnnnnnnnnnnnnnnnnnnnnnnnnnnnnnnnnnnnnnnnnnnnnnnnnnnnnnnnnnnnnnnnnnnnnnnnnnnnnnnnnnnnnnnnnnnnnnnnnnnnnnnnnnnnnnnnnnnnnnnnnnnnnnnnnnnnnnnnnnnnnnnnnnnnnnnnnnnnnnnnnnnnnnnnnnnnnnnnnnnnnnnnnnnnnnnnnnnnnnnnnnnnnnnnnnnnnnnnnnnnnnnnnnnnnnnnnnnnnnnnnnnnnnnnnnnnnnnnnnnnnnnnnnnnnnnnnnnnnnnnnnnnnnnnnnnnnnnnnnnnnnnnnnnnnnnnnnnnnnnnnnnnnnnnnnnnnnnnnnnnnnnnnnnnnnnnnnnnnnnnnnnnnnnnnnnnnnnnnnnnnnnnnnnnnnnnnnnnnnnnnnnnnnnnnnnnnnnnnnnnnnnnnnnnnnnnnnnnnnnnnnnnnnnnnnnnnnnnnnnnnnnnnnnnnnnnnnnnnnnnnnnnnnnnnnnnnnnnnnnnnnnnnnnnnnnnnnnnnnnnnnnnnnnnnnnnnnnnnnnnnnnnnnnnnnnnnnnnnnnnnnnnnnnnnnnnnnnnnnnnnnnnnnnnnnnnnnnnnnnnnnnnnnnnnnnnnnnnnnnnnnnnnnnnnnnnnnnnnnnnnnnnnnnnnnnnnnnnnnnnnnnnnnnnnnnnnnnnnnnnnnnnnnnnnnnnnnnnnnnnnnnnnnnnnnnnnnnnnnnnnnnnnnnnnnnnnnnnnnnnnnnnnnnnnnnnnnnnnnnnnnnnnnnnnnnnnnnnnnnnnnnnnnnnnnnnnnnnnnnnnnnnnnnnnnnnnnnnnnnnnnnnnnnnnnnnnnnnnnnnnnnnnnnnnnnnnnnnnnnnnnnnnnnnnnnnnnnnnnnnnnnnnnnnnnnnnnnnnnnnnnnnnnnnnnnnnnnnnnnnnnnnnnnnnnnnnnnnnnnnnnnnnnnnnnnnnnnnnnnnnnnnnnnnnnnnnnnnnnnnnnnnnnnnnnnnnnnnnnnnngataactacatcatcgccggagttgggcacccttccgccagcccaggccgcggggtcgctccaatagccgccggcatctgaagaatagacggtcagggccatgatctggcccagtaaagaaagtaaaaacaatactgctaaagcgtttttcataataaactcctttggttggctttcatagacaggctgtttaattacgtcaagagaattgttgagcccgtcacgattgactcagggtcttgtcgagacaacaatgcttccaggtcattttgtcaggcataatgccgtccatgctgaatgattcattgttaatgtccgggcaaatcgacagagtgacggggtttgaggttttcggtggcgggtttatatagggagacctccctaatttgattattcccgccctaataatcactcaaagcaaatatcttgacaatgatctttattcataatagaaggtttccattgagcaaatggagcatattatgtacaatcttctttgtgataattgggtaaatgtgatctatctttcgggcaaaccagatagaatatctttagtgcagactcttaaagatgcacacaatctgcaactggcatacagcaaccccatggacaggtttgctgtcttcagattcctgcttgctcttggctactggtgtttcgctaacaccaacgaggcccctgaacctgataagccgcttccggtctcctggataccctggctggaggaaaacaaggagtatttcgagctctttggggatggcccccggttttaccaagacaatccaagttccaggatcagagccattaccgaccttattcatgagataccaacagctcataatctatgccatttcaatcatgtcaccgactatatcgatgggctctgcgaagcttgctgcatcaagggactgctgagattacctgtctttaccactgtcggtggcagagggataggtgcgggaatcaacaacactcctccattttacctgctctggcatgcaaatgacctcgctggcatgctggctcataattggcaaccctgggataatatggggattccggcatggttgggttcttttcaaaaagaaagcaaggaagtgggcttacttgccggaatgacctggctgccgcgcaaggtgcatctgcatgatcccgtcccaggtcaggcagcatgtagttcctgcggcttaccctccgaagctctcgtctattcctgcagcatagaagtggagccagtaccggaaggccttgagtggaaagaccctcatggtgtttacaccgatctgaaaaaaagcctccagtccaaaatcaaactgatgtccaatgatagatacactttcgcggaccgggattggtatagtccgctgttcagctatttgcgcgcggaaggaaactccagaaaaggaaaactctggttggttggatttgccagtgataaagcaaaaagcatagacatctgggacaagatcatcgagtttgagggaactgatacaaatgatgagttgctggctcaattggcaaacagggctactgcccttaatatcatgcgcaagatatctctcagaggtgatttcaaaaagtcagtgggcacaccccagattgctgacattatcccccacgccgaaagcagaattgccatcaatgcgggtaaaatgactgagaacaggggctattcctggcaggatgccgatgctgaatacagagaactgctcacaaaggttgcgtgctctttggagccggctcaaacagtggacgccaggctcaagagaggtaaattcatttcccgcaagccctggccaattataccagaatccaaaacaaaacccgcagagggggaccaaaatgaatagaggaacagttgacttcattacaagcctggagaacctcaaagaaggcgatttgggcattcttagaaaactcaggggagcccggcttgatgaagagcttcccggatttgacctttttacagccctctggtggcctttgcggcaaaagaatcaacgcgcccccaagcgtgaagtggcttggttgatcgccaaactttttgctgaattccgctttgaacagcgcgaggaagccactttgcccatacttatgggaagcatttgccggaaacttggaccaaaaaaggaattaccccgtgtactggcacgttttgatcaacttgcatcgcttgacattatgcatatggaagaaccgctgttggtcatcatgggtattttgcgaaagcaccagcaggtctactttgactgggtagatctgacagatgttctgtcattttgggagcaggagactgtcaaaagagaatggtcggattcatttactaaagcatacaagatcaacaaggaggattcagatgttgattgaaattcatatgattcagaatcacagcccggcaaatcttaaccgggacgacttgggcgcccccaagacctgttatttcggtggagtattacgttcgcgcatctccagccagtgcatcaagcgcagcatccgttttgccccggagttcgcagaccttagaggaggtatccgaacaaggcgtctggcagagaaacttgaggaaatgctggaaaacaaagataagaagctggttgcaaagttcctggaagcctgtggagttaaaaccaaatcttccaagaaagctggaaaaaagtccgaacagatacccgcggaaaccgatgaagctcaggaagagcagcaggcggctgatacgtcggatatgctgatttttaccacctatgatgccctacgccaaatggccgtcctgctttccaactccaatctcggtgaaagtgaaaaactgcttgggtttaaggaactacttacaaactgcgtccattctcctgatatagcactttgcggcaggatgttggagaccaaagagcttaaaaacactggcgtggaatgcgctttgcaggttgcacatgcgctttccacccacattgccaggccggagatcgactactttgtagcggccgatgatgttcctggtgaagacgccggagcgggtcatattggcgaatccatgtttgcctcagcctgtttctacaaatacttctccattgattgggagcaattggtcaagaacctgaaaggagacactcatctggcagcccacaccgtgggtgcctttctcctcgccgctgccaaaaccaaccccagtggcaaacagaacagcttcgccgctcataacttgccagatggcatacttgtcgagttcaaaaattcccctattagctacgccaacgcattcgtcaggccagtttccctggtcaaggattcggacctggtggagcaaagcatcggccagctttccaactacgtgaacgacatcaggcttggctattatgatgagcaatccccagttatcagcttctggttttctccaaacaatcgctattcccttggcaaagagcatcccaaactggcctccaggagcattggcaacctcaatgagcttgtaagcgccgtgttggattatattggcagcttcgagtgggaagaagttcggaaaagcaaggcttatgttggcgggtgacatgagtgctccacccaataccttattcttgcgcttggagggggctttgcagtcctggggcagcaacgaggctaagtttgctttgcgcaggactgccgacgctccgacaaaatctggtgtcctgggactgctctgcgcggcaatgggaattgggcgcgcggaggctgctgattcatggctcccaaaacttgccaacctgcgcatgggcgtgcggatagaccgccccggcatacgctggtgggatttccacactgtgggcgcgggacaaagaatgcgcatggcagagctgaaggcacccaagaaaccttccatggttggagcggccctggctgagaccttgacaccaaacaaaatacaaaccagggcagagactttgctctcacgccgcgaatatcttgccgacgccagttttctggtcgccttgcaaggtgagccggaacttgtggaaaagctctccaccgctctggccaagccggtctgggctatttatctggggcgcaaatcctgtcccccttcacgtcccgtaggcgagcatcctccgggcttttacaacactttggaggaggcgctgtccgcggttcccctgcaaaagcgctggcacaatgaacccctgccgcaaacactgccttgcgtcatggactggattcccagccgtgacggagaacatgcacctgatgacgcagagattcattacgatctgccggtttcttttcagccgcccagacatttgccgcgcttcgtgatcaggcgtgagctgtttgtgggagaggatgtgcaagtgagcagggaaaccggaaccaacgtttggaggcccaaaggaacccgggcggattatagcaattccgagtataagaaggtcagggcggagcggcttgtgatggatcatgccgcgtgcatggtgtgcaaagctcctgccacgacagttcaacacgtggattaccgcagggcgggaggcaaggaagtaccggaagatctgcgggcgctgtgccgcctctgccacgacgcctgcaccatgctggaatacggttccggcatgaccaccgatcgcatcgacccctgcgaccccatctggcgggagcgtattttgtcaaagcgcaaagaaatagtcgagttccgttcgcgcgggcagcgtttccgcaaaatgaaaccagaggaggaagacggatgatctacttgtccaggctattgatcgatactggaggcaatccagaccgcccccgccccggcagaaagtggctggacaatgtctataacgtccaccgccgcctctccatggcgtttccttcaggtttacgccgggagcaggatccgcatttcctgaagcccttttcgccaaacgacttccaaaaaactcccttccttttccgggtcgataacaacatcgacggaaacgataaaagggcgattattatcgtccagtccgttcttgagccggattgggattattgcttccaaaacgcgcttgatttcctggccgcgccgccggaaacaaaggagtataatccagagtttaaagcgggacaactgctgcggttcaggctgcgggtaaacgccagcgtacgccgtcatattcctgaaatggtgcaacaggacggtcaaaccatagaaactggcaaaatcctgcacaaaagggtttctcttacctgggatgcttcttccaccccggatcaggcccttgccgactggctggctgccaaaagcccaaagctgggcttcacccttcagcgctgtgagcttcttcaactgggttgggtttatggctccaagccagaaccaaaaaatgtcaaagtaaaggaacaggggcagggctactggcgtgaacacacatacaatcctctgcgcttccgtgcggctctcctggagggagttctcgaggtggatgacccgaaactgttcctggaaacgcttagcagcggcattggaaaagcgaaaagtttcggctttggcctgctgtcagttctgccaatcaggaatgatggataaagacctgcactctattccccggatcagagaccggcttagctatctctatgtggagcatgccaaaattgaccagaacgggcaagccatcgccattcacgacgctctgggtgaaaccccggttccttgtgccggcttggctatgctgatgctgggaccgggcataaccatcacacatgcggcaatactttcactggctgcctgtggctgtctcgtagcctgggtgggagaacatggcgtcaggttctatgccgcaggcacaggtacaacccgcagcgctgtcaatcttatgaaacaggcaaagtactgggcagacccggttttgcatctacgggttgtacgcgccatgtaccagttaaggtttcaggatgagctttctccagatttaactttgaaccagatcaggggcaaggaaggtgcccgggtgcgcgatacatatttccaactctcccaaaagtatggtgtgcccatgcagggcagaaactatcaaagagacaactggaataaagcagaccccataaaccgggctttatctgtggcaaactcatgcctctacggcatatcgcacgctgccatcgttgctgcaggattctctcccggattgggctttgtccacactggcaagcaactgtcatttgtctatgatatcgcggatctatacaaaatggagatggctgctcccgccgcattccgggcgaccgctgaagggatcggcgaactcgaccgcagagtcaggcttgcctgccgtgatgaattccacaggcagaatctactcaaacgcattgtcgctgacattagttctctcttcggtgatattatgccagaggatagcccggatgactgttttgccgaagaaccagccttgcctggaggactctggtctccagatggagaagtttccccaggcggcatatcttacgggcaggatgatctgccaaaggaagattgatggtggttttggttttggaaaacgtgccaaactccttgcggggtcagatcacacgttggctgctggaagtaaaggcgggggtgtttgtgggtaaagtctcagcaatggttagggacaaactgtgggataaggttagaagcaattgcagcggtgggacttgcctgatgatctggagtagccaggccgaacagggttttgatatcgaattctggggtgccgcatcaagagtcgttacggaatgggagggtatcaaactaatgaccaaacatccttgaactaaggcttgaaggagctcaatgacctgttagctctctattgatcaagtgtattccccacgcatgtgggggtgaaccgagatctcgctcatccacggctgggtggaagatgtattccccacgcatgtgggggtgaaccgccgctgcagaacatctttggcgggcaactggagtattccccacgcatgtgggggtgaaccgaaccgggtgacgtggctgatgccgatcaaccagtattccccacgcatgtgggggtgaaccggaacagctcaagacgcgcaactacaaggtcgggtattccccacgcatgtgggggtgaaccgaaccgggtgacgtggctgatgccgatcaaccagtattccccacgcatgtgggggtgaaccgcaataaaaagaagcactctacgaatgagatgagtattccccacgcatgtgggggtgaaccgacgcctataccggcccccgcgcccgcgccctcgtattccccacgcatgtgggggtgaaccggtggattaaaaacaattgattctttatcagatgtattccccacgcatgtgggggtgaaccgaaaacgatggttactactgtgttgatagctatgtattccccacgcatgtgggggtgaaccgaatctggctcttgtcggaacctccgcctttccacctaaaaaacacctttccacgaactattaattcgtggataactctaaaagtccaacctgcttcagccccaatatttgcggtcgaggctgcggtattggatggcttcggagatgtggtcggatttgatggcggccaggccttccaggtcggcgatggtgcgcgccaccttgaggatgcggtcgaagacccgggcggaatagcccagtttgtcgatcgcgtgctgcatctggctttggctgggggcatccagcgcgcagtgtttgcgcagcagtttggagttcatctgggcgttgcagaagatgccatctttggcatagcgttcccgctggatggcgcgggcgcggttgaccctggcgcggatgtcggcggagctgtcgccggaaggcaaagacgccagatcggaataggtgaccgagggcacttccacgtggatgtcgatgcggtcaagcagcgggccggagatacggctgcggtagcgttggatggcgccatattcgcaggtgcaggggtgattggggatgctggagccgaaatagccgcagggacaggggttcatggaggcgatgagcatgaattccgcgggaaaggtgaggctttgggaggcgcgggagatagtgacgatgccatcctccaggggctggcgcagcacttccagcacgccacgcttgaactctggcagttcatccagaaacagcactccgcgatgcgccagggatacctcgccggggcgggggaaggctcctcccccgatcagggcgatatcgctgacggtatgatgcgggctgcgataggggcgggtggtgaggatgccgttgtgaaaatctttggagtggcctgccacggagtggatcttggtagcttccagggcttcatccagcgagagttccggcaggatggtgggcacgcgccgggcgagcatggtcttgcccgaaccgggagggccaagcatcagcaggttgtggcctccggcggcggagacctccagggcacgcttgacctgaaactgacccttcacgtcgtgcatatccacgggaaaggcattcagggtggcaaagatctgctcgcggtcgacttctgcgggcggaatcttcgcctcgccgcgcagaaagagggccgcttccttcagcgaggtgaccgggatcacctgcaagccgtcgatgatggcggcttccccggcgttttcccagggcaggacgagggtgtcgatgccatcccgtttggcggccaaagcgatgggcagcactcccttgacggggcgcaggttgccatccagcgaaagctcgccgatgagggcggtcttggtcaggtattccaccggaatctgtttgatggactgcagcacggcgatggcgatggggaggtcgagggcggcgctgtccttgcggatgtccgccggggcgaggttgatggtgaagcggcgcacggcggcgtcccaaccggaattgcgcagggcggcgaagatgcggtcctggctttccttgaccgcgctggatgccatgcccacgatggtgaccccgaaaacctgagaggtggcgtcacactccactgtgagctgttgcccgtctattcctatcgtggtgtaagtgcgcactattccaaccatttgatcctacccttgtttggtattttgcattgtttgtcagtaaaatagcggtcggcgcaacggtcaagggaaaagtgcgggagggggtgttgattgtccacgaattacacgaattattagacgtggaaaggtggaaaagtgttttgaggtggaaaggtggaaaggtgaaatggtgaaatgaggtgtcctgaaacaagtcctcaaccaagctatatactgtgtcatcacaggcaagctcgcttaccacaggatccagtctttttgaataatcatccacaaattacacaaattaacacgaattaaaggaacagaataaggacaagcgtccagcctaaaaacaagcacagaccccaaaacaaacaccccctgactaaaagccgtgtcatcccgggcagccggtgcccctctagggtggctgacccgggatccagtcttttagaaacgtccacaaattacacaaattaacacgaattaaaagacagaataaggacaagcgtccagcctaaaaacaagcacagaccccgaaacaaaccatacaagactacatactgtgtcatcccgggcttgacccgggatccagtcttttagaaacaaccagccagcccgtaaacaaacaaccccagactaaaagagtgtcatcacggcctgcgagccgtgatccagtcttttagaaacaaccagccagcccggaaacaaagcacccccagactacacaccgcgtcatcacggcctgcgagccgtgatccagtgtccaggggtggcaaagtccgtttgccacagagaccggaggtctcttccaaacaggcaactccgttgcctctgccgaacagacttcggcagccctttaatcaca

SEQ ID NO: 1062 - DNA, 105158 bp, Artificial Sequence
  Synthetic Oligonucleotide
  misc_feature (1)..(95406): n is a, c, g, or t
nnnnnnnnnnnnnnnnnnnnnnnnnnnnnnnnnnnnnnnnnnnnnnnnnnnnnnnnnnnnnnnnnnnnnnnnnnnnnnnnnnnnnnnnnnnnnnnnnnnnnnnnnnnnnnnnnnnnnnnnnnnnnnnnnnnnnnnnnnnnnnnnnnnnnnnnnnnnnnnnnnnnnnnnnnnnnnnnnnnnnnnnnnnnnnnnnnnnnnnnnnnnnnnnnnnnnnnnnnnnnnnnnnnnnnnnnnnnnnnnnnnnnnnnnnnnnnnnnnnnnnnnnnnnnnnnnnnnnnnnnnnnnnnnnnnnnnnnnnnnnnnnnnnnnnnnnnnnnnnnnnnnnnnnnnnnnnnnnnnnnnnnnnnnnnnnnnnnnnnnnnnnnnnnnnnnnnnnnnnnnnnnnnnnnnnnnnnnnnnnnnnnnnnnnnnnnnnnnnnnnnnnnnnnnnnnnnnnnnnnnnnnnnnnnnnnnnnnnnnnnnnnnnnnnnnnnnnnnnnnnnnnnnnnnnnnnnnnnnnnnnnnnnnnnnnnnnnnnnnnnnnnnnnnnnnnnnnnnnnnnnnnnnnnnnnnnnnnnnnnnnnnnnnnnnnnnnnnnnnnnnnnnnnnnnnnnnnnnnnnnnnnnnnnnnnnnnnnnnnnnnnnnnnnnnnnnnnnnnnnnnnnnnnnnnnnnnnnnnnnnnnnnnnnnnnnnnnnnnnnnnnnnnnnnnnnnnnnnnnnnnnnnnnnnnnnnnnnnnnnnnnnnnnnnnnnnnnnnnnnnnnnnnnnnnnnnnnnnnnnnnnnnnnnnnnnnnnnnnnnnnnnnnnnnnnnnnnnnnnnnnnnnnnnnnnnnnnnnnnnnnnnnnnnnnnnnnnnnnnnnnnnnnnnnnnnnnnnnnnnnnnnnnnnnnnnnnnnnnnnnnnnnnnnnnnnnnnnnnnnnnnnnnnnnnnnnnnnnnnnnnnnnnnnnnnnnnnnnnnnnnnnnnnnnnnnnnnnnnnnnnnnnnnnnnnnnnnnnnnnnnnnnnnnnnnnnnnnnnnnnnnnnnnnnnnnnnnnnnnnnnnnnnnnnnnnnnnnnnnnnnnnnnnnnnnnnnnnnnnnnnnnnnnnnnnnnnnnnnnnnnnnnnnnnnnnnnnnnnnnnnnnnnnnnnnnnnnnnnnnnnnnnnnnnnnnnnnnnnnnnnnnnnnnnnnnnnnnnnnnnnnnnnnnnnnnnnnnnnnnnnnnnnnnnnnnnnnnnnnnnnnnnnnnnnnnnnnnnnnnnnnnnnnnnnnnnnnnnnnnnnnnnnnnnnnnnnnnnnnnnnnnnnnnnnnnnnnnnnnnnnnnnnnnnnnnnnnnnnnnnnnnnnnnnnnnnnnnnnnnnnnnnnnnnnnnnnnnnnnnnnnnnnnnnnnnnnnnnnnnnnnnnnnnnnnnnnnnnnnnnnnnnnnnnnnnnnnnnnnnnnnnnnnnnnnnnnnnnnnnnnnnnnnnnnnnnnnnnnnnnnnnnnnnnnnnnnnnnnnnnnnnnnnnnnnnnnnnnnnnnnnnnnnnnnnnnnnnnnnnnnnnnnnnnnnnnnnnnnnnnnnnnnnnnnnnnnnnnnnnnnnnnnnnnnnnnnnnnnnnnnnnnnnnnnnnnnnnnnnnnnnnnnnnnnnnnnnnnnnnnnnnnnnnnnnnnnnnnnnnnnnnnnnnnnnnnnnnnnnnnnnnnnnnnnnnnnnnnnnnnnnnnnnnnnnnnnnnnnnnnnnnnnnnnnnnnnnnnnnnnnnnnnnnnnnnnnnnnnnnnnnnnnnnnnnnnnnnnnnnnnnnnnnnnnnnnnnnnnnnnnnnnnnnnnnnnnnnnnnnnnnnnnnnnnnnnnnnnnnnnnnnnnnnnnnnnnnnnnnnnnnnnnnnnnnnnnnnnnnnnnnnnnnnnnnnnnnnnnnnnnnnnnnnnnnnnnnnnnnnnnnnnnnnnnnnnnnnnnnnnnnnnnnnnnnnnnnnnnnnnnnnnnnnnnnnnnnnnnnnnnnnnnnnnnnnnnnnnnnnnnnnnnnnnnnnnnnnnnnnnnnnnnnnnnnnnnnnnnnnnnnnnnnnnnnnnnnnnnnnnnnnnnnnnnnnnnnnnnnnnnnnnnnnnnnnnnnnnnnnnnnnnnnnnnnnnnnnnnnnnnnnnnnnnnnnnnnnnnnnnnnnnnnnnnnnnnnnnnnnnnnnnnnnnnnnnnnnnnnnnnnnnnnnnnnnnnnnnnnnnnnnnnnnnnnnnnnnnnnnnnnnnnnnnnnnnnnnnnnnnnnnnnnnnnnnnnnnnnnnnnnnnnnnnnnnnnnnnnnnnnnnnnnnnnnnnnnnnnnnnnnnnnnnnnnnnnnnnnnnnnnnnnnnnnnnnnnnnnnnnnnnnnnnnnnnnnnnnnnnnnnnnnnnnnnnnnnnnnnnnnnnnnnnnnnnnnnnnnnnnnnnnnnnnnnnnnnnnnnnnnnnnnnnnnnnnnnnnnnnnnnnnnnnnnnnnnnnnnnnnnnnnnnnnnnnnnnnnnnnnnnnnnnnnnnnnnnnnnnnnnnnnnnnnnnnnnnnnnnnnnnnnnnnnnnnnnnnnnnnnnnnnnnnnnnnnnnnnnnnnnnnnnnnnnnnnnnnnnnnnnnnnnnnnnnnnnnnnnnnnnnnnnnnnnnnnnnnnnnnnnnnnnnnnnnnnnnnnnnnnnnnnnnnnnnnnnnnnnnnnnnnnnnnnnnnnnnnnnnnnnnnnnnnnnnnnnnnnnnnnnnnnnnnnnnnnnnnnnnnnnnnnnnnnnnnnnnnnnnnnnnnnnnnnnnnnnnnnnnnnnnnnnnnnnnnnnnnnnnnnnnnnnnnnnnnnnnnnnnnnnnnnnnnnnnnnnnnnnnnnnnnnnnnnnnnnnnnnnnnnnnnnnnnnnnnnnnnnnnnnnnnnnnnnnnnnnnnnnnnnnnnnnnnnnnnnnnnnnnnnnnnnnnnnnnnnnnnnnnnnnnnnnnnnnnnnnnnnnnnnnnnnnnnnnnnnnnnnnnnnnnnnnnnnnnnnnnnnnnnnnnnnnnnnnnnnnnnnnnnnnnnnnnnnnnnnnnnnnnnnnnnnnnnnnnnnnnnnnnnnnnnnnnnnnnnnnnnnnnnnnnnnnnnnnnnnnnnnnnnnnnnnnnnnnnnnnnnnnnnnnnnnnnnnnnnnnnnnnnnnnnnnnnnnnnnnnnnnnnnnnnnnnnnnnnnnnnnnnnnnnnnnnnnnnnnnnnnnnnnnnnnnnnnnnnnnnnnnnnnnnnnnnnnnnnnnnnnnnnnnnnnnnnnnnnnnnnnnnnnnnnnnnnnnnnnnnnnnnnnnnnnnnnnnnnnnnnnnnnnnnnnnnnnnnnnnnnnnnnnnnnnnnnnnnnnnnnnnnnnnnnnnnnnnnnnnnnnnnnnnnnnnnnnnnnnnnnnnnnnnnnnnnnnnnnnnnnnnnnnnnnnnnnnnnnnnnnnnnnnnnnnnnnnnnnnnnnnnnnnnnnnnnnnnnnnnnnnnnnnnnnnnnnnnnnnnnnnnnnnnnnnnnnnnnnnnnnnnnnnnnnnnnnnnnnnnnnnnnnnnnnnnnnnnnnnnnnnnnnnnnnnnnnnnnnnnnnnnnnnnnnnnnnnnnnnnnnnnnnnnnnnnnnnnnnnnnnnnnnnnnnnnnnnnnnnnnnnnnnnnnnnnnnnnnnnnnnnnnnnnnnnnnnnnnnnnnnnnnnnnnnnnnnnnnnnnnnnnnnnnnnnnnnnnnnnnnnnnnnnnnnnnnnnnnnnnnnnnnnnnnnnnnnnnnnnnnnnnnnnnnnnnnnnnnnnnnnnnnnnnnnnnnnnnnnnnnnnnnnnnnnnnnnnnnnnnnnnnnnnnnnnnnnnnnnnnnnnnnnnnnnnnnnnnnnnnnnnnnnnnnnnnnnnnnnnnnnnnnnnnnnnnnnnnnnnnnnnnnnnnnnnnnnnnnnnnnnnnnnnnnnnnnnnnnnnnnnnnnnnnnnnnnnnnnnnnnnnnnnnnnnnnnnnnnnnnnnnnnnnnnnnnnnnnnnnnnnnnnnnnnnnnnnnnnnnnnnnnnnnnnnnnnnnnnnnnnnnnnnnnnnnnnnnnnnnnnnnnnnnnnnnnnnnnnnnnnnnnnnnnnnnnnnnnnnnnnnnnnnnnnnnnnnnnnnnnnnnnnnnnnnnnnnnnnnnnnnnnnnnnnnnnnnnnnnnnnnnnnnnnnnnnnnnnnnnnnnnnnnnnnnnnnnnnnnnnnnnnnnnnnnnnnnnnnnnnnnnnnnnnnnnnnnnnnnnnnnnnnnnnnnnnnnnnnnnnnnnnnnnnnnnnnnnnnnnnnnnnnnnnnnnnnnnnnnnnnnnnnnnnnnnnnnnnnnnnnnnnnnnnnnnnnnnnnnnnnnnnnnnnnnnnnnnnnnnnnnnnnnnnnnnnnnnnnnnnnnnnnnnnnnnnnnnnnnnnnnnnnnnnnnnnnnnnnnnnnnnnnnnnnnnnnnnnnnnnnnnnnnnnnnnnnnnnnnnnnnnnnnnnnnnnnnnnnnnnnnnnnnnnnnnnnnnnnnnnnnnnnnnnnnnnnnnnnnnnnnnnnnnnnnnnnnnnnnnnnnnnnnnnnnnnnnnnnnnnnnnnnnnnnnnnnnnnnnnnnnnnnnnnnnnnnnnnnnnnnnnnnnnnnnnnnnnnnnnnnnnnnnnnnnnnnnnnnnnnnnnnnnnnnnnnnnnnnnnnnnnnnnnnnnnnnnnnnnnnnnnnnnnnnnnnnnnnnnnnnnnnnnnnnnnnnnnnnnnnnnnnnnnnnnnnnnnnnnnnnnnnnnnnnnnnnnnnnnnnnnnnnnnnnnnnnnnnnnnnnnnnnnnnnnnnnnnnnnnnnnnnnnnnnnnnnnnnnnnnnnnnnnnnnnnnnnnnnnnnnnnnnnnnnnnnnnnnnnnnnnnnnnnnnnnnnnnnnnnnnnnnnnnnnnnnnnnnnnnnnnnnnnnnnnnnnnnnnnnnnnnnnnnnnnnnnnnnnnnnnnnnnnnnnnnnnnnnnnnnnnnnnnnnnnnnnnnnnnnnnnnnnnnnnnnnnnnnnnnnnnnnnnnnnnnnnnnnnnnnnnnnnnnnnnnnnnnnnnnnnnnnnnnnnnnnnnnnnnnnnnnnnnnnnnnnnnnnnnnnnnnnnnnnnnnnnnnnnnnnnnnnnnnnnnnnnnnnnnnnnnnnnnnnnnnnnnnnnnnnnnnnnnnnnnnnnnnnnnnnnnnnnnnnnnnnnnnnnnnnnnnnnnnnnnnnnnnnnnnnnnnnnnnnnnnnnnnnnnnnnnnnnnnnnnnnnnnnnnnnnnnnnnnnnnnnnnnnnnnnnnnnnnnnnnnnnnnnnnnnnnnnnnnnnnnnnnnnnnnnnnnnnnnnnnnnnnnnnnnnnnnnnnnnnnnnnnnnnnnnnnnnnnnnnnnnnnnnnnnnnnnnnnnnnnnnnnnnnnnnnnnnnnnnnnnnnnnnnnnnnnnnnnnnnnnnnnnnnnnnnnnnnnnnnnnnnnnnnnnnnnnnnnnnnnnnnnnnnnnnnnnnnnnnnnnnnnnnnnnnnnnnnnnnnnnnnnnnnnnnnnnnnnnnnnnnnnnnnnnnnnnnnnnnnnnnnnnnnnnnnnnnnnnnnnnnnnnnnnnnnnnnnnnnnnnnnnnnnnnnnnnnnnnnnnnnnnnnnnnnnnnnnnnnnnnnnnnnnnnnnnnnnnnnnnnnnnnnnnnnnnnnnnnnnnnnnnnnnnnnnnnnnnnnnnnnnnnnnnnnnnnnnnnnnnnnnnnnnnnnnnnnnnnnnnnnnnnnnnnnnnnnnnnnnnnnnnnnnnnnnnnnnnnnnnnnnnnnnnnnnnnnnnnnnnnnnnnnnnnnnnnnnnnnnnnnnnnnnnnnnnnnnnnnnnnnnnnnnnnnnnnnnnnnnnnnnnnnnnnnnnnnnnnnnnnnnnnnnnnnnnnnnnnnnnnnnnnnnnnnnnnnnnnnnnnnnnnnnnnnnnnnnnnnnnnnnnnnnnnnnnnnnnnnnnnnnnnnnnnnnnnnnnnnnnnnnnnnnnnnnnnnnnnnnnnnnnnnnnnnnnnnnnnnnnnnnnnnnnnnnnnnnnnnnnnnnnnnnnnnnnnnnnnnnnnnnnnnnnnnnnnnnnnnnnnnnnnnnnnnnnnnnnnnnnnnnnnnnnnnnnnnnnnnnnnnnnnnnnnnnnnnnnnnnnnnnnnnnnnnnnnnnnnnnnnnnnnnnnnnnnnnnnnnnnnnnnnnnnnnnnnnnnnnnnnnnnnnnnnnnnnnnnnnnnnnnnnnnnnnnnnnnnnnnnnnnnnnnnnnnnnnnnnnnnnnnnnnnnnnnnnnnnnnnnnnnnnnnnnnnnnnnnnnnnnnnnnnnnnnnnnnnnnnnnnnnnnnnnnnnnnnnnnnnnnnnnnnnnnnnnnnnnnnnnnnnnnnnnnnnnnnnnnnnnnnnnnnnnnnnnnnnnnnnnnnnnnnnnnnnnnnnnnnnnnnnnnnnnnnnnnnnnnnnnnnnnnnnnnnnnnnnnnnnnnnnnnnnnnnnnnnnnnnnnnnnnnnnnnnnnnnnnnnnnnnnnnnnnnnnnnnnnnnnnnnnnnnnnnnnnnnnnnnnnnnnnnnnnnnnnnnnnnnnnnnnnnnnnnnnnnnnnnnnnnnnnnnnnnnnnnnnnnnnnnnnnnnnnnnnnnnnnnnnnnnnnnnnnnnnnnnnnnnnnnnnnnnnnnnnnnnnnnnnnnnnnnnnnnnnnnnnnnnnnnnnnnnnnnnnnnnnnnnnnnnnnnnnnnnnnnnnnnnnnnnnnnnnnnnnnnnnnnnnnnnnnnnnnnnnnnnnnnnnnnnnnnnnnnnnnnnnnnnnnnnnnnnnnnnnnnnnnnnnnnnnnnnnnnnnnnnnnnnnnnnnnnnnnnnnnnnnnnnnnnnnnnnnnnnnnnnnnnnnnnnnnnnnnnnnnnnnnnnnnnnnnnnnnnnnnnnnnnnnnnnnnnnnnnnnnnnnnnnnnnnnnnnnnnnnnnnnnnnnnnnnnnnnnnnnnnnnnnnnnnnnnnnnnnnnnnnnnnnnnnnnnnnnnnnnnnnnnnnnnnnnnnnnnnnnnnnnnnnnnnnnnnnnnnnnnnnnnnnnnnnnnnnnnnnnnnnnnnnnnnnnnnnnnnnnnnnnnnnnnnnnnnnnnnnnnnnnnnnnnnnnnnnnnnnnnnnnnnnnnnnnnnnnnnnnnnnnnnnnnnnnnnnnnnnnnnnnnnnnnnnnnnnnnnnnnnnnnnnnnnnnnnnnnnnnnnnnnnnnnnnnnnnnnnnnnnnnnnnnnnnnnnnnnnnnnnnnnnnnnnnnnnnnnnnnnnnnnnnnnnnnnnnnnnnnnnnnnnnnnnnnnnnnnnnnnnnnnnnnnnnnnnnnnnnnnnnnnnnnnnnnnnnnnnnnnnnnnnnnnnnnnnnnnnnnnnnnnnnnnnnnnnnnnnnnnnnnnnnnnnnnnnnnnnnnnnnnnnnnnnnnnnnnnnnnnnnnnnnnnnnnnnnnnnnnnnnnnnnnnnnnnnnnnnnnnnnnnnnnnnnnnnnnnnnnnnnnnnnnnnnnnnnnnnnnnnnnnnnnnnnnnnnnnnnnnnnnnnnnnnnnnnnnnnnnnnnnnnnnnnnnnnnnnnnnnnnnnnnnnnnnnnnnnnnnnnnnnnnnnnnnnnnnnnnnnnnnnnnnnnnnnnnnnnnnnnnnnnnnnnnnnnnnnnnnnnnnnnnnnnnnnnnnnnnnnnnnnnnnnnnnnnnnnnnnnnnnnnnnnnnnnnnnnnnnnnnnnnnnnnnnnnnnnnnnnnnnnnnnnnnnnnnnnnnnnnnnnnnnnnnnnnnnnnnnnnnnnnnnnnnnnnnnnnnnnnnnnnnnnnnnnnnnnnnnnnnnnnnnnnnnnnnnnnnnnnnnnnnnnnnnnnnnnnnnnnnnnnnnnnnnnnnnnnnnnnnnnnnnnnnnnnnnnnnnnnnnnnnnnnnnnnnnnnnnnnnnnnnnnnnnnnnnnnnnnnnnnnnnnnnnnnnnnnnnnnnnnnnnnnnnnnnnnnnnnnnnnnnnnnnnnnnnnnnnnnnnnnnnnnnnnnnnnnnnnnnnnnnnnnnnnnnnnnnnnnnnnnnnnnnnnnnnnnnnnnnnnnnnnnnnnnnnnnnnnnnnnnnnnnnnnnnnnnnnnnnnnnnnnnnnnnnnnnnnnnnnnnnnnnnnnnnnnnnnnnnnnnnnnnnnnnnnnnnnnnnnnnnnnnnnnnnnnnnnnnnnnnnnnnnnnnnnnnnnnnnnnnnnnnnnnnnnnnnnnnnnnnnnnnnnnnnnnnnnnnnnnnnnnnnnnnnnnnnnnnnnnnnnnnnnnnnnnnnnnnnnnnnnnnnnnnnnnnnnnnnnnnnnnnnnnnnnnnnnnnnnnnnnnnnnnnnnnnnnnnnnnnnnnnnnnnnnnnnnnnnnnnnnnnnnnnnnnnnnnnnnnnnnnnnnnnnnnnnnnnnnnnnnnnnnnnnnnnnnnnnnnnnnnnnnnnnnnnnnnnnnnnnnnnnnnnnnnnnnnnnnnnnnnnnnnnnnnnnnnnnnnnnnnnnnnnnnnnnnnnnnnnnnnnnnnnnnnnnnnnnnnnnnnnnnnnnnnnnnnnnnnnnnnnnnnnnnnnnnnnnnnnnnnnnnnnnnnnnnnnnnnnnnnnnnnnnnnnnnnnnnnnnnnnnnnnnnnnnnnnnnnnnnnnnnnnnnnnnnnnnnnnnnnnnnnnnnnnnnnnnnnnnnnnnnnnnnnnnnnnnnnnnnnnnnnnnnnnnnnnnnnnnnnnnnnnnnnnnnnnnnnnnnnnnnnnnnnnnnnnnnnnnnnnnnnnnnnnnnnnnnnnnnnnnnnnnnnnnnnnnnnnnnnnnnnnnnnnnnnnnnnnnnnnnnnnnnnnnnnnnnnnnnnnnnnnnnnnnnnnnnnnnnnnnnnnnnnnnnnnnnnnnnnnnnnnnnnnnnnnnnnnnnnnnnnnnnnnnnnnnnnnnnnnnnnnnnnnnnnnnnnnnnnnnnnnnnnnnnnnnnnnnnnnnnnnnnnnnnnnnnnnnnnnnnnnnnnnnnnnnnnnnnnnnnnnnnnnnnnnnnnnnnnnnnnnnnnnnnnnnnnnnnnnnnnnnnnnnnnnnnnnnnnnnnnnnnnnnnnnnnnnnnnnnnnnnnnnnnnnnnnnnnnnnnnnnnnnnnnnnnnnnnnnnnnnnnnnnnnnnnnnnnnnnnnnnnnnnnnnnnnnnnnnnnnnnnnnnnnnnnnnnnnnnnnnnnnnnnnnnnnnnnnnnnnnnnnnnnnnnnnnnnnnnnnnnnnnnnnnnnnnnnnnnnnnnnnnnnnnnnnnnnnnnnnnnnnnnnnnnnnnnnnnnnnnnnnnnnnnnnnnnnnnnnnnnnnnnnnnnnnnnnnnnnnnnnnnnnnnnnnnnnnnnnnnnnnnnnnnnnnnnnnnnnnnnnnnnnnnnnnnnnnnnnnnnnnnnnnnnnnnnnnnnnnnnnnnnnnnnnnnnnnnnnnnnnnnnnnnnnnnnnnnnnnnnnnnnnnnnnnnnnnnnnnnnnnnnnnnnnnnnnnnnnnnnnnnnnnnnnnnnnnnnnnnnnnnnnnnnnnnnnnnnnnnnnnnnnnnnnnnnnnnnnnnnnnnnnnnnnnnnnnnnnnnnnnnnnnnnnnnnnnnnnnnnnnnnnnnnnnnnnnnnnnnnnnnnnnnnnnnnnnnnnnnnnnnnnnnnnnnnnnnnnnnnnnnnnnnnnnnnnnnnnnnnnnnnnnnnnnnnnnnnnnnnnnnnnnnnnnnnnnnnnnnnnnnnnnnnnnnnnnnnnnnnnnnnnnnnnnnnnnnnnnnnnnnnnnnnnnnnnnnnnnnnnnnnnnnnnnnnnnnnnnnnnnnnnnnnnnnnnnnnnnnnnnnnnnnnnnnnnnnnnnnnnnnnnnnnnnnnnnnnnnnnnnnnnnnnnnnnnnnnnnnnnnnnnnnnnnnnnnnnnnnnnnnnnnnnnnnnnnnnnnnnnnnnnnnnnnnnnnnnnnnnnnnnnnnnnnnnnnnnnnnnnnnnnnnnnnnnnnnnnnnnnnnnnnnnnnnnnnnnnnnnnnnnnnnnnnnnnnnnnnnnnnnnnnnnnnnnnnnnnnnnnnnnnnnnnnnnnnnnnnnnnnnnnnnnnnnnnnnnnnnnnnnnnnnnnnnnnnnnnnnnnnnnnnnnnnnnnnnnnnnnnnnnnnnnnnnnnnnnnnnnnnnnnnnnnnnnnnnnnnnnnnnnnnnnnnnnnnnnnnnnnnnnnnnnnnnnnnnnnnnnnnnnnnnnnnnnnnnnnnnnnnnnnnnnnnnnnnnnnnnnnnnnnnnnnnnnnnnnnnnnnnnnnnnnnnnnnnnnnnnnnnnnnnnnnnnnnnnnnnnnnnnnnnnnnnnnnnnnnnnnnnnnnnnnnnnnnnnnnnnnnnnnnnnnnnnnnnnnnnnnnnnnnnnnnnnnnnnnnnnnnnnnnnnnnnnnnnnnnnnnnnnnnnnnnnnnnnnnnnnnnnnnnnnnnnnnnnnnnnnnnnnnnnnnnnnnnnnnnnnnnnnnnnnnnnnnnnnnnnnnnnnnnnnnnnnnnnnnnnnnnnnnnnnnnnnnnnnnnnnnnnnnnnnnnnnnnnnnnnnnnnnnnnnnnnnnnnnnnnnnnnnnnnnnnnnnnnnnnnnnnnnnnnnnnnnnnnnnnnnnnnnnnnnnnnnnnnnnnnnnnnnnnnnnnnnnnnnnnnnnnnnnnnnnnnnnnnnnnnnnnnnnnnnnnnnnnnnnnnnnnnnnnnnnnnnnnnnnnnnnnnnnnnnnnnnnnnnnnnnnnnnnnnnnnnnnnnnnnnnnnnnnnnnnnnnnnnnnnnnnnnnnnnnnnnnnnnnnnnnnnnnnnnnnnnnnnnnnnnnnnnnnnnnnnnnnnnnnnnnnnnnnnnnnnnnnnnnnnnnnnnnnnnnnnnnnnnnnnnnnnnnnnnnnnnnnnnnnnnnnnnnnnnnnnnnnnnnnnnnnnnnnnnnnnnnnnnnnnnnnnnnnnnnnnnnnnnnnnnnnnnnnnnnnnnnnnnnnnnnnnnnnnnnnnnnnnnnnnnnnnnnnnnnnnnnnnnnnnnnnnnnnnnnnnnnnnnnnnnnnnnnnnnnnnnnnnnnnnnnnnnnnnnnnnnnnnnnnnnnnnnnnnnnnnnnnnnnnnnnnnnnnnnnnnnnnnnnnnnnnnnnnnnnnnnnnnnnnnnnnnnnnnnnnnnnnnnnnnnnnnnnnnnnnnnnnnnnnnnnnnnnnnnnnnnnnnnnnnnnnnnnnnnnnnnnnnnnnnnnnnnnnnnnnnnnnnnnnnnnnnnnnnnnnnnnnnnnnnnnnnnnnnnnnnnnnnnnnnnnnnnnnnnnnnnnnnnnnnnnnnnnnnnnnnnnnnnnnnnnnnnnnnnnnnnnnnnnnnnnnnnnnnnnnnnnnnnnnnnnnnnnnnnnnnnnnnnnnnnnnnnnnnnnnnnnnnnnnnnnnnnnnnnnnnnnnnnnnnnnnnnnnnnnnnnnnnnnnnnnnnnnnnnnnnnnnnnnnnnnnnnnnnnnnnnnnnnnnnnnnnnnnnnnnnnnnnnnnnnnnnnnnnnnnnnnnnnnnnnnnnnnnnnnnnnnnnnnnnnnnnnnnnnnnnnnnnnnnnnnnnnnnnnnnnnnnnnnnnnnnnnnnnnnnnnnnnnnnnnnnnnnnnnnnnnnnnnnnnnnnnnnnnnnnnnnnnnnnnnnnnnnnnnnnnnnnnnnnnnnnnnnnnnnnnnnnnnnnnnnnnnnnnnnnnnnnnnnnnnnnnnnnnnnnnnnnnnnnnnnnnnnnnnnnnnnnnnnnnnnnnnnnnnnnnnnnnnnnnnnnnnnnnnnnnnnnnnnnnnnnnnnnnnnnnnnnnnnnnnnnnnnnnnnnnnnnnnnnnnnnnnnnnnnnnnnnnnnnnnnnnnnnnnnnnnnnnnnnnnnnnnnnnnnnnnnnnnnnnnnnnnnnnnnnnnnnnnnnnnnnnnnnnnnnnnnnnnnnnnnnnnnnnnnnnnnnnnnnnnnnnnnnnnnnnnnnnnnnnnnnnnnnnnnnnnnnnnnnnnnnnnnnnnnnnnnnnnnnnnnnnnnnnnnnnnnnnnnnnnnnnnnnnnnnnnnnnnnnnnnnnnnnnnnnnnnnnnnnnnnnnnnnnnnnnnnnnnnnnnnnnnnnnnnnnnnnnnnnnnnnnnnnnnnnnnnnnnnnnnnnnnnnnnnnnnnnnnnnnnnnnnnnnnnnnnnnnnnnnnnnnnnnnnnnnnnnnnnnnnnnnnnnnnnnnnnnnnnnnnnnnnnnnnnnnnnnnnnnnnnnnnnnnnnnnnnnnnnnnnnnnnnnnnnnnnnnnnnnnnnnnnnnnnnnnnnnnnnnnnnnnnnnnnnnnnnnnnnnnnnnnnnnnnnnnnnnnnnnnnnnnnnnnnnnnnnnnnnnnnnnnnnnnnnnnnnnnnnnnnnnnnnnnnnnnnnnnnnnnnnnnnnnnnnnnnnnnnnnnnnnnnnnnnnnnnnnnnnnnnnnnnnnnnnnnnnnnnnnnnnnnnnnnnnnnnnnnnnnnnnnnnnnnnnnnnnnnnnnnnnnnnnnnnnnnnnnnnnnnnnnnnnnnnnnnnnnnnnnnnnnnnnnnnnnnnnnnnnnnnnnnnnnnnnnnnnnnnnnnnnnnnnnnnnnnnnnnnnnnnnnnnnnnnnnnnnnnnnnnnnnnnnnnnnnnnnnnnnnnnnnnnnnnnnnnnnnnnnnnnnnnnnnnnnnnnnnnnnnnnnnnnnnnnnnnnnnnnnnnnnnnnnnnnnnnnnnnnnnnnnnnnnnnnnnnnnnnnnnnnnnnnnnnnnnnnnnnnnnnnnnnnnnnnnnnnnnnnnnnnnnnnnnnnnnnnnnnnnnnnnnnnnnnnnnnnnnnnnnnnnnnnnnnnnnnnnnnnnnnnnnnnnnnnnnnnnnnnnnnnnnnnnnnnnnnnnnnnnnnnnnnnnnnnnnnnnnnnnnnnnnnnnnnnnnnnnnnnnnnnnnnnnnnnnnnnnnnnnnnnnnnnnnnnnnnnnnnnnnnnnnnnnnnnnnnnnnnnnnnnnnnnnnnnnnnnnnnnnnnnnnnnnnnnnnnnnnnnnnnnnnnnnnnnnnnnnnnnnnnnnnnnnnnnnnnnnnnnnnnnnnnnnnnnnnnnnnnnnnnnnnnnnnnnnnnnnnnnnnnnnnnnnnnnnnnnnnnnnnnnnnnnnnnnnnnnnnnnnnnnnnnnnnnnnnnnnnnnnnnnnnnnnnnnnnnnnnnnnnnnnnnnnnnnnnnnnnnnnnnnnnnnnnnnnnnnnnnnnnnnnnnnnnnnnnnnnnnnnnnnnnnnnnnnnnnnnnnnnnnnnnnnnnnnnnnnnnnnnnnnnnnnnnnnnnnnnnnnnnnnnnnnnnnnnnnnnnnnnnnnnnnnnnnnnnnnnnnnnnnnnnnnnnnnnnnnnnnnnnnnnnnnnnnnnnnnnnnnnnnnnnnnnnnnnnnnnnnnnnnnnnnnnnnnnnnnnnnnnnnnnnnnnnnnnnnnnnnnnnnnnnnnnnnnnnnnnnnnnnnnnnnnnnnnnnnnnnnnnnnnnnnnnnnnnnnnnnnnnnnnnnnnnnnnnnnnnnnnnnnnnnnnnnnnnnnnnnnnnnnnnnnnnnnnnnnnnnnnnnnnnnnnnnnnnnnnnnnnnnnnnnnnnnnnnnnnnnnnnnnnnnnnnnnnnnnnnnnnnnnnnnnnnnnnnnnnnnnnnnnnnnnnnnnnnnnnnnnnnnnnnnnnnnnnnnnnnnnnnnnnnnnnnnnnnnnnnnnnnnnnnnnnnnnnnnnnnnnnnnnnnnnnnnnnnnnnnnnnnnnnnnnnnnnnnnnnnnnnnnnnnnnnnnnnnnnnnnnnnnnnnnnnnnnnnnnnnnnnnnnnnnnnnnnnnnnnnnnnnnnnnnnnnnnnnnnnnnnnnnnnnnnnnnnnnnnnnnnnnnnnnnnnnnnnnnnnnnnnnnnnnnnnnnnnnnnnnnnnnnnnnnnnnnnnnnnnnnnnnnnnnnnnnnnnnnnnnnnnnnnnnnnnnnnnnnnnnnnnnnnnnnnnnnnnnnnnnnnnnnnnnnnnnnnnnnnnnnnnnnnnnnnnnnnnnnnnnnnnnnnnnnnnnnnnnnnnnnnnnnnnnnnnnnnnnnnnnnnnnnnnnnnnnnnnnnnnnnnnnnnnnnnnnnnnnnnnnnnnnnnnnnnnnnnnnnnnnnnnnnnnnnnnnnnnnnnnnnnnnnnnnnnnnnnnnnnnnnnnnnnnnnnnnnnnnnnnnnnnnnnnnnnnnnnnnnnnnnnnnnnnnnnnnnnnnnnnnnnnnnnnnnnnnnnnnnnnnnnnnnnnnnnnnnnnnnnnnnnnnnnnnnnnnnnnnnnnnnnnnnnnnnnnnnnnnnnnnnnnnnnnnnnnnnnnnnnnnnnnnnnnnnnnnnnnnnnnnnnnnnnnnnnnnnnnnnnnnnnnnnnnnnnnnnnnnnnnnnnnnnnnnnnnnnnnnnnnnnnnnnnnnnnnnnnnnnnnnnnnnnnnnnnnnnnnnnnnnnnnnnnnnnnnnnnnnnnnnnnnnnnnnnnnnnnnnnnnnnnnnnnnnnnnnnnnnnnnnnnnnnnnnnnnnnnnnnnnnnnnnnnnnnnnnnnnnnnnnnnnnnnnnnnnnnnnnnnnnnnnnnnnnnnnnnnnnnnnnnnnnnnnnnnnnnnnnnnnnnnnnnnnnnnnnnnnnnnnnnnnnnnnnnnnnnnnnnnnnnnnnnnnnnnnnnnnnnnnnnnnnnnnnnnnnnnnnnnnnnnnnnnnnnnnnnnnnnnnnnnnnnnnnnnnnnnnnnnnnnnnnnnnnnnnnnnnnnnnnnnnnnnnnnnnnnnnnnnnnnnnnnnnnnnnnnnnnnnnnnnnnnnnnnnnnnnnnnnnnnnnnnnnnnnnnnnnnnnnnnnnnnnnnnnnnnnnnnnnnnnnnnnnnnnnnnnnnnnnnnnnnnnnnnnnnnnnnnnnnnnnnnnnnnnnnnnnnnnnnnnnnnnnnnnnnnnnnnnnnnnnnnnnnnnnnnnnnnnnnnnnnnnnnnnnnnnnnnnnnnnnnnnnnnnnnnnnnnnnnnnnnnnnnnnnnnnnnnnnnnnnnnnnnnnnnnnnnnnnnnnnnnnnnnnnnnnnnnnnnnnnnnnnnnnnnnnnnnnnnnnnnnnnnnnnnnnnnnnnnnnnnnnnnnnnnnnnnnnnnnnnnnnnnnnnnnnnnnnnnnnnnnnnnnnnnnnnnnnnnnnnnnnnnnnnnnnnnnnnnnnnnnnnnnnnnnnnnnnnnnnnnnnnnnnnnnnnnnnnnnnnnnnnnnnnnnnnnnnnnnnnnnnnnnnnnnnnnnnnnnnnnnnnnnnnnnnnnnnnnnnnnnnnnnnnnnnnnnnnnnnnnnnnnnnnnnnnnnnnnnnnnnnnnnnnnnnnnnnnnnnnnnnnnnnnnnnnnnnnnnnnnnnnnnnnnnnnnnnnnnnnnnnnnnnnnnnnnnnnnnnnnnnnnnnnnnnnnnnnnnnnnnnnnnnnnnnnnnnnnnnnnnnnnnnnnnnnnnnnnnnnnnnnnnnnnnnnnnnnnnnnnnnnnnnnnnnnnnnnnnnnnnnnnnnnnnnnnnnnnnnnnnnnnnnnnnnnnnnnnnnnnnnnnnnnnnnnnnnnnnnnnnnnnnnnnnnnnnnnnnnnnnnnnnnnnnnnnnnnnnnnnnnnnnnnnnnnnnnnnnnnnnnnnnnnnnnnnnnnnnnnnnnnnnnnnnnnnnnnnnnnnnnnnnnnnnnnnnnnnnnnnnnnnnnnnnnnnnnnnnnnnnnnnnnnnnnnnnnnnnnnnnnnnnnnnnnnnnnnnnnnnnnnnnnnnnnnnnnnnnnnnnnnnnnnnnnnnnnnnnnnnnnnnnnnnnnnnnnnnnnnnnnnnnnnnnnnnnnnnnnnnnnnnnnnnnnnnnnnnnnnnnnnnnnnnnnnnnnnnnnnnnnnnnnnnnnnnnnnnnnnnnnnnnnnnnnnnnnnnnnnnnnnnnnnnnnnnnnnnnnnnnnnnnnnnnnnnnnnnnnnnnnnnnnnnnnnnnnnnnnnnnnnnnnnnnnnnnnnnnnnnnnnnnnnnnnnnnnnnnnnnnnnnnnnnnnnnnnnnnnnnnnnnnnnnnnnnnnnnnnnnnnnnnnnnnnnnnnnnnnnnnnnnnnnnnnnnnnnnnnnnnnnnnnnnnnnnnnnnnnnnnnnnnnnnnnnnnnnnnnnnnnnnnnnnnnnnnnnnnnnnnnnnnnnnnnnnnnnnnnnnnnnnnnnnnnnnnnnnnnnnnnnnnnnnnnnnnnnnnnnnnnnnnnnnnnnnnnnnnnnnnnnnnnnnnnnnnnnnnnnnnnnnnnnnnnnnnnnnnnnnnnnnnnnnnnnnnnnnnnnnnnnnnnnnnnnnnnnnnnnnnnnnnnnnnnnnnnnnnnnnnnnnnnnnnnnnnnnnnnnnnnnnnnnnnnnnnnnnnnnnnnnnnnnnnnnnnnnnnnnnnnnnnnnnnnnnnnnnnnnnnnnnnnnnnnnnnnnnnnnnnnnnnnnnnnnnnnnnnnnnnnnnnnnnnnnnnnnnnnnnnnnnnnnnnnnnnnnnnnnnnnnnnnnnnnnnnnnnnnnnnnnnnnnnnnnnnnnnnnnnnnnnnnnnnnnnnnnnnnnnnnnnnnnnnnnnnnnnnnnnnnnnnnnnnnnnnnnnnnnnnnnnnnnnnnnnnnnnnnnnnnnnnnnnnnnnnnnnnnnnnnnnnnnnnnnnnnnnnnnnnnnnnnnnnnnnnnnnnnnnnnnnnnnnnnnnnnnnnnnnnnnnnnnnnnnnnnnnnnnnnnnnnnnnnnnnnnnnnnnnnnnnnnnnnnnnnnnnnnnnnnnnnnnnnnnnnnnnnnnnnnnnnnnnnnnnnnnnnnnnnnnnnnnnnnnnnnnnnnnnnnnnnnnnnnnnnnnnnnnnnnnnnnnnnnnnnnnnnnnnnnnnnnnnnnnnnnnnnnnnnnnnnnnnnnnnnnnnnnnnnnnnnnnnnnnnnnnnnnnnnnnnnnnnnnnnnnnnnnnnnnnnnnnnnnnnnnnnnnnnnnnnnnnnnnnnnnnnnnnnnnnnnnnnnnnnnnnnnnnnnnnnnnnnnnnnnnnnnnnnnnnnnnnnnnnnnnnnnnnnnnnnnnnnnnnnnnnnnnnnnnnnnnnnnnnnnnnnnnnnnnnnnnnnnnnnnnnnnnnnnnnnnnnnnnnnnnnnnnnnnnnnnnnnnnnnnnnnnnnnnnnnnnnnnnnnnnnnnnnnnnnnnnnnnnnnnnnnnnnnnnnnnnnnnnnnnnnnnnnnnnnnnnnnnnnnnnnnnnnnnnnnnnnnnnnnnnnnnnnnnnnnnnnnnnnnnnnnnnnnnnnnnnnnnnnnnnnnnnnnnnnnnnnnnnnnnnnnnnnnnnnnnnnnnnnnnnnnnnnnnnnnnnnnnnnnnnnnnnnnnnnnnnnnnnnnnnnnnnnnnnnnnnnnnnnnnnnnnnnnnnnnnnnnnnnnnnnnnnnnnnnnnnnnnnnnnnnnnnnnnnnnnnnnnnnnnnnnnnnnnnnnnnnnnnnnnnnnnnnnnnnnnnnnnnnnnnnnnnnnnnnnnnnnnnnnnnnnnnnnnnnnnnnnnnnnnnnnnnnnnnnnnnnnnnnnnnnnnnnnnnnnnnnnnnnnnnnnnnnnnnnnnnnnnnnnnnnnnnnnnnnnnnnnnnnnnnnnnnnnnnnnnnnnnnnnnnnnnnnnnnnnnnnnnnnnnnnnnnnnnnnnnnnnnnnnnnnnnnnnnnnnnnnnnnnnnnnnnnnnnnnnnnnnnnnnnnnnnnnnnnnnnnnnnnnnnnnnnnnnnnnnnnnnnnnnnnnnnnnnnnnnnnnnnnnnnnnnnnnnnnnnnnnnnnnnnnnnnnnnnnnnnnnnnnnnnnnnnnnnnnnnnnnnnnnnnnnnnnnnnnnnnnnnnnnnnnnnnnnnnnnnnnnnnnnnnnnnnnnnnnnnnnnnnnnnnnnnnnnnnnnnnnnnnnnnnnnnnnnnnnnnnnnnnnnnnnnnnnnnnnnnnnnnnnnnnnnnnnnnnnnnnnnnnnnnnnnnnnnnnnnnnnnnnnnnnnnnnnnnnnnnnnnnnnnnnnnnnnnnnnnnnnnnnnnnnnnnnnnnnnnnnnnnnnnnnnnnnnnnnnnnnnnnnnnnnnnnnnnnnnnnnnnnnnnnnnnnnnnnnnnnnnnnnnnnnnnnnnnnnnnnnnnnnnnnnnnnnnnnnnnnnnnnnnnnnnnnnnnnnnnnnnnnnnnnnnnnnnnnnnnnnnnnnnnnnnnnnnnnnnnnnnnnnnnnnnnnnnnnnnnnnnnnnnnnnnnnnnnnnnnnnnnnnnnnnnnnnnnnnnnnnnnnnnnnnnnnnnnnnnnnnnnnnnnnnnnnnnnnnnnnnnnnnnnnnnnnnnnnnnnnnnnnnnnnnnnnnnnnnnnnnnnnnnnnnnnnnnnnnnnnnnnnnnnnnnnnnnnnnnnnnnnnnnnnnnnnnnnnnnnnnnnnnnnnnnnnnnnnnnnnnnnnnnnnnnnnnnnnnnnnnnnnnnnnnnnnnnnnnnnnnnnnnnnnnnnnnnnnnnnnnnnnnnnnnnnnnnnnnnnnnnnnnnnnnnnnnnnnnnnnnnnnnnnnnnnnnnnnnnnnnnnnnnnnnnnnnnnnnnnnnnnnnnnnnnnnnnnnnnnnnnnnnnnnnnnnnnnnnnnnnnnnnnnnnnnnnnnnnnnnnnnnnnnnnnnnnnnnnnnnnnnnnnnnnnnnnnnnnnnnnnnnnnnnnnnnnnnnnnnnnnnnnnnnnnnnnnnnnnnnnnnnnnnnnnnnnnnnnnnnnnnnnnnnnnnnnnnnnnnnnnnnnnnnnnnnnnnnnnnnnnnnnnnnnnnnnnnnnnnnnnnnnnnnnnnnnnnnnnnnnnnnnnnnnnnnnnnnnnnnnnnnnnnnnnnnnnnnnnnnnnnnnnnnnnnnnnnnnnnnnnnnnnnnnnnnnnnnnnnnnnnnnnnnnnnnnnnnnnnnnnnnnnnnnnnnnnnnnnnnnnnnnnnnnnnnnnnnnnnnnnnnnnnnnnnnnnnnnnnnnnnnnnnnnnnnnnnnnnnnnnnnnnnnnnnnnnnnnnnnnnnnnnnnnnnnnnnnnnnnnnnnnnnnnnnnnnnnnnnnnnnnnnnnnnnnnnnnnnnnnnnnnnnnnnnnnnnnnnnnnnnnnnnnnnnnnnnnnnnnnnnnnnnnnnnnnnnnnnnnnnnnnnnnnnnnnnnnnnnnnnnnnnnnnnnnnnnnnnnnnnnnnnnnnnnnnnnnnnnnnnnnnnnnnnnnnnnnnnnnnnnnnnnnnnnnnnnnnnnnnnnnnnnnnnnnnnnnnnnnnnnnnnnnnnnnnnnnnnnnnnnnnnnnnnnnnnnnnnnnnnnnnnnnnnnnnnnnnnnnnnnnnnnnnnnnnnnnnnnnnnnnnnnnnnnnnnnnnnnnnnnnnnnnnnnnnnnnnnnnnnnnnnnnnnnnnnnnnnnnnnnnnnnnnnnnnnnnnnnnnnnnnnnnnnnnnnnnnnnnnnnnnnnnnnnnnnnnnnnnnnnnnnnnnnnnnnnnnnnnnnnnnnnnnnnnnnnnnnnnnnnnnnnnnnnnnnnnnnnnnnnnnnnnnnnnnnnnnnnnnnnnnnnnnnnnnnnnnnnnnnnnnnnnnnnnnnnnnnnnnnnnnnnnnnnnnnnnnnnnnnnnnnnnnnnnnnnnnnnnnnnnnnnnnnnnnnnnnnnnnnnnnnnnnnnnnnnnnnnnnnnnnnnnnnnnnnnnnnnnnnnnnnnnnnnnnnnnnnnnnnnnnnnnnnnnnnnnnnnnnnnnnnnnnnnnnnnnnnnnnnnnnnnnnnnnnnnnnnnnnnnnnnnnnnnnnnnnnnnnnnnnnnnnnnnnnnnnnnnnnnnnnnnnnnnnnnnnnnnnnnnnnnnnnnnnnnnnnnnnnnnnnnnnnnnnnnnnnnnnnnnnnnnnnnnnnnnnnnnnnnnnnnnnnnnnnnnnnnnnnnnnnnnnnnnnnnnnnnnnnnnnnnnnnnnnnnnnnnnnnnnnnnnnnnnnnnnnnnnnnnnnnnnnnnnnnnnnnnnnnnnnnnnnnnnnnnnnnnnnnnnnnnnnnnnnnnnnnnnnnnnnnnnnnnnnnnnnnnnnnnnnnnnnnnnnnnnnnnnnnnnnnnnnnnnnnnnnnnnnnnnnnnnnnnnnnnnnnnnnnnnnnnnnnnnnnnnnnnnnnnnnnnnnnnnnnnnnnnnnnnnnnnnnnnnnnnnnnnnnnnnnnnnnnnnnnnnnnnnnnnnnnnnnnnnnnnnnnnnnnnnnnnnnnnnnnnnnnnnnnnnnnnnnnnnnnnnnnnnnnnnnnnnnnnnnnnnnnnnnnnnnnnnnnnnnnnnnnnnnnnnnnnnnnnnnnnnnnnnnnnnnnnnnnnnnnnnnnnnnnnnnnnnnnnnnnnnnnnnnnnnnnnnnnnnnnnnnnnnnnnnnnnnnnnnnnnnnnnnnnnnnnnnnnnnnnnnnnnnnnnnnnnnnnnnnnnnnnnnnnnnnnnnnnnnnnnnnnnnnnnnnnnnnnnnnnnnnnnnnnnnnnnnnnnnnnnnnnnnnnnnnnnnnnnnnnnnnnnnnnnnnnnnnnnnnnnnnnnnnnnnnnnnnnnnnnnnnnnnnnnnnnnnnnnnnnnnnnnnnnnnnnnnnnnnnnnnnnnnnnnnnnnnnnnnnnnnnnnnnnnnnnnnnnnnnnnnnnnnnnnnnnnnnnnnnnnnnnnnnnnnnnnnnnnnnnnnnnnnnnnnnnnnnnnnnnnnnnnnnnnnnnnnnnnnnnnnnnnnnnnnnnnnnnnnnnnnnnnnnnnnnnnnnnnnnnnnnnnnnnnnnnnnnnnnnnnnnnnnnnnnnnnnnnnnnnnnnnnnnnnnnnnnnnnnnnnnnnnnnnnnnnnnnnnnnnnnnnnnnnnnnnnnnnnnnnnnnnnnnnnnnnnnnnnnnnnnnnnnnnnnnnnnnnnnnnnnnnnnnnnnnnnnnnnnnnnnnnnnnnnnnnnnnnnnnnnnnnnnnnnnnnnnnnnnnnnnnnnnnnnnnnnnnnnnnnnnnnnnnnnnnnnnnnnnnnnnnnnnnnnnnnnnnnnnnnnnnnnnnnnnnnnnnnnnnnnnnnnnnnnnnnnnnnnnnnnnnnnnnnnnnnnnnnnnnnnnnnnnnnnnnnnnnnnnnnnnnnnnnnnnnnnnnnnnnnnnnnnnnnnnnnnnnnnnnnnnnnnnnnnnnnnnnnnnnnnnnnnnnnnnnnnnnnnnnnnnnnnnnnnnnnnnnnnnnnnnnnnnnnnnnnnnnnnnnnnnnnnnnnnnnnnnnnnnnnnnnnnnnnnnnnnnnnnnnnnnnnnnnnnnnnnnnnnnnnnnnnnnnnnnnnnnnnnnnnnnnnnnnnnnnnnnnnnnnnnnnnnnnnnnnnnnnnnnnnnnnnnnnnnnnnnnnnnnnnnnnnnnnnnnnnnnnnnnnnnnnnnnnnnnnnnnnnnnnnnnnnnnnnnnnnnnnnnnnnnnnnnnnnnnnnnnnnnnnnnnnnnnnnnnnnnnnnnnnnnnnnnnnnnnnnnnnnnnnnnnnnnnnnnnnnnnnnnnnnnnnnnnnnnnnnnnnnnnnnnnnnnnnnnnnnnnnnnnnnnnnnnnnnnnnnnnnnnnnnnnnnnnnnnnnnnnnnnnnnnnnnnnnnnnnnnnnnnnnnnnnnnnnnnnnnnnnnnnnnnnnnnnnnnnnnnnnnnnnnnnnnnnnnnnnnnnnnnnnnnnnnnnnnnnnnnnnnnnnnnnnnnnnnnnnnnnnnnnnnnnnnnnnnnnnnnnnnnnnnnnnnnnnnnnnnnnnnnnnnnnnnnnnnnnnnnnnnnnnnnnnnnnnnnnnnnnnnnnnnnnnnnnnnnnnnnnnnnnnnnnnnnnnnnnnnnnnnnnnnnnnnnnnnnnnnnnnnnnnnnnnnnnnnnnnnnnnnnnnnnnnnnnnnnnnnnnnnnnnnnnnnnnnnnnnnnnnnnnnnnnnnnnnnnnnnnnnnnnnnnnnnnnnnnnnnnnnnnnnnnnnnnnnnnnnnnnnnnnnnnnnnnnnnnnnnnnnnnnnnnnnnnnnnnnnnnnnnnnnnnnnnnnnnnnnnnnnnnnnnnnnnnnnnnnnnnnnnnnnnnnnnnnnnnnnnnnnnnnnnnnnnnnnnnnnnnnnnnnnnnnnnnnnnnnnnnnnnnnnnnnnnnnnnnnnnnnnnnnnnnnnnnnnnnnnnnnnnnnnnnnnnnnnnnnnnnnnnnnnnnnnnnnnnnnnnnnnnnnnnnnnnnnnnnnnnnnnnnnnnnnnnnnnnnnnnnnnnnnnnnnnnnnnnnnnnnnnnnnnnnnnnnnnnnnnnnnnnnnnnnnnnnnnnnnnnnnnnnnnnnnnnnnnnnnnnnnnnnnnnnnnnnnnnnnnnnnnnnnnnnnnnnnnnnnnnnnnnnnnnnnnnnnnnnnnnnnnnnnnnnnnnnnnnnnnnnnnnnnnnnnnnnnnnnnnnnnnnnnnnnnnnnnnnnnnnnnnnnnnnnnnnnnnnnnnnnnnnnnnnnnnnnnnnnnnnnnnnnnnnnnnnnnnnnnnnnnnnnnnnnnnnnnnnnnnnnnnnnnnnnnnnnnnnnnnnnnnnnnnnnnnnnnnnnnnnnnnnnnnnnnnnnnnnnnnnnnnnnnnnnnnnnnnnnnnnnnnnnnnnnnnnnnnnnnnnnnnnnnnnnnnnnnnnnnnnnnnnnnnnnnnnnnnnnnnnnnnnnnnnnnnnnnnnnnnnnnnnnnnnnnnnnnnnnnnnnnnnnnnnnnnnnnnnnnnnnnnnnnnnnnnnnnnnnnnnnnnnnnnnnnnnnnnnnnnnnnnnnnnnnnnnnnnnnnnnnnnnnnnnnnnnnnnnnnnnnnnnnnnnnnnnnnnnnnnnnnnnnnnnnnnnnnnnnnnnnnnnnnnnnnnnnnnnnnnnnnnnnnnnnnnnnnnnnnnnnnnnnnnnnnnnnnnnnnnnnnnnnnnnnnnnnnnnnnnnnnnnnnnnnnnnnnnnnnnnnnnnnnnnnnnnnnnnnnnnnnnnnnnnnnnnnnnnnnnnnnnnnnnnnnnnnnnnnnnnnnnnnnnnnnnnnnnnnnnnnnnnnnnnnnnnnnnnnnnnnnnnnnnnnnnnnnnnnnnnnnnnnnnnnnnnnnnnnnnnnnnnnnnnnnnnnnnnnnnnnnnnnnnnnnnnnnnnnnnnnnnnnnnnnnnnnnnnnnnnnnnnnnnnnnnnnnnnnnnnnnnnnnnnnnnnnnnnnnnnnnnnnnnnnnnnnnnnnnnnnnnnnnnnnnnnnnnnnnnnnnnnnnnnnnnnnnnnnnnnnnnnnnnnnnnnnnnnnnnnnnnnnnnnnnnnnnnnnnnnnnnnnnnnnnnnnnnnnnnnnnnnnnnnnnnnnnnnnnnnnnnnnnnnnnnnnnnnnnnnnnnnnnnnnnnnnnnnnnnnnnnnnnnnnnnnnnnnnnnnnnnnnnnnnnnnnnnnnnnnnnnnnnnnnnnnnnnnnnnnnnnnnnnnnnnnnnnnnnnnnnnnnnnnnnnnnnnnnnnnnnnnnnnnnnnnnnnnnnnnnnnnnnnnnnnnnnnnnnnnnnnnnnnnnnnnnnnnnnnnnnnnnnnnnnnnnnnnnnnnnnnnnnnnnnnnnnnnnnnnnnnnnnnnnnnnnnnnnnnnnnnnnnnnnnnnnnnnnnnnnnnnnnnnnnnnnnnnnnnnnnnnnnnnnnnnnnnnnnnnnnnnnnnnnnnnnnnnnnnnnnnnnnnnnnnnnnnnnnnnnnnnnnnnnnnnnnnnnnnnnnnnnnnnnnnnnnnnnnnnnnnnnnnnnnnnnnnnnnnnnnnnnnnnnnnnnnnnnnnnnnnnnnnnnnnnnnnnnnnnnnnnnnnnnnnnnnnnnnnnnnnnnnnnnnnnnnnnnnnnnnnnnnnnnnnnnnnnnnnnnnnnnnnnnnnnnnnnnnnnnnnnnnnnnnnnnnnnnnnnnnnnnnnnnnnnnnnnnnnnnnnnnnnnnnnnnnnnnnnnnnnnnnnnnnnnnnnnnnnnnnnnnnnnnnnnnnnnnnnnnnnnnnnnnnnnnnnnnnnnnnnnnnnnnnnnnnnnnnnnnnnnnnnnnnnnnnnnnnnnnnnnnnnnnnnnnnnnnnnnnnnnnnnnnnnnnnnnnnnnnnnnnnnnnnnnnnnnnnnnnnnnnnnnnnnnnnnnnnnnnnnnnnnnnnnnnnnnnnnnnnnnnnnnnnnnnnnnnnnnnnnnnnnnnnnnnnnnnnnnnnnnnnnnnnnnnnnnnnnnnnnnnnnnnnnnnnnnnnnnnnnnnnnnnnnnnnnnnnnnnnnnnnnnnnnnnnnnnnnnnnnnnnnnnnnnnnnnnnnnnnnnnnnnnnnnnnnnnnnnnnnnnnnnnnnnnnnnnnnnnnnnnnnnnnnnnnnnnnnnnnnnnnnnnnnnnnnnnnnnnnnnnnnnnnnnnnnnnnnnnnnnnnnnnnnnnnnnnnnnnnnnnnnnnnnnnnnnnnnnnnnnnnnnnnnnnnnnnnnnnnnnnnnnnnnnnnnnnnnnnnnnnnnnnnnnnnnnnnnnnnnnnnnnnnnnnnnnnnnnnnnnnnnnnnnnnnnnnnnnnnnnnnnnnnnnnnnnnnnnnnnnnnnnnnnnnnnnnnnnnnnnnnnnnnnnnnnnnnnnnnnnnnnnnnnnnnnnnnnnnnnnnnnnnnnnnnnnnnnnnnnnnnnnnnnnnnnnnnnnnnnnnnnnnnnnnnnnnnnnnnnnnnnnnnnnnnnnnnnnnnnnnnnnnnnnnnnnnnnnnnnnnnnnnnnnnnnnnnnnnnnnnnnnnnnnnnnnnnnnnnnnnnnnnnnnnnnnnnnnnnnnnnnnnnnnnnnnnnnnnnnnnnnnnnnnnnnnnnnnnnnnnnnnnnnnnnnnnnnnnnnnnnnnnnnnnnnnnnnnnnnnnnnnnnnnnnnnnnnnnnnnnnnnnnnnnnnnnnnnnnnnnnnnnnnnnnnnnnnnnnnnnnnnnnnnnnnnnnnnnnnnnnnnnnnnnnnnnnnnnnnnnnnnnnnnnnnnnnnnnnnnnnnnnnnnnnnnnnnnnnnnnnnnnnnnnnnnnnnnnnnnnnnnnnnnnnnnnnnnnnnnnnnnnnnnnnnnnnnnnnnnnnnnnnnnnnnnnnnnnnnnnnnnnnnnnnnnnnnnnnnnnnnnnnnnnnnnnnnnnnnnnnnnnnnnnnnnnnnnnnnnnnnnnnnnnnnnnnnnnnnnnnnnnnnnnnnnnnnnnnnnnnnnnnnnnnnnnnnnnnnnnnnnnnnnnnnnnnnnnnnnnnnnnnnnnnnnnnnnnnnnnnnnnnnnnnnnnnnnnnnnnnnnnnnnnnnnnnnnnnnnnnnnnnnnnnnnnnnnnnnnnnnnnnnnnnnnnnnnnnnnnnnnnnnnnnnnnnnnnnnnnnnnnnnnnnnnnnnnnnnnnnnnnnnnnnnnnnnnnnnnnnnnnnnnnnnnnnnnnnnnnnnnnnnnnnnnnnnnnnnnnnnnnnnnnnnnnnnnnnnnnnnnnnnnnnnnnnnnnnnnnnnnnnnnnnnnnnnnnnnnnnnnnnnnnnnnnnnnnnnnnnnnnnnnnnnnnnnnnnnnnnnnnnnnnnnnnnnnnnnnnnnnnnnnnnnnnnnnnnnnnnnnnnnnnnnnnnnnnnnnnnnnnnnnnnnnnnnnnnnnnnnnnnnnnnnnnnnnnnnnnnnnnnnnnnnnnnnnnnnnnnnnnnnnnnnnnnnnnnnnnnnnnnnnnnnnnnnnnnnnnnnnnnnnnnnnnnnnnnnnnnnnnnnnnnnnnnnnnnnnnnnnnnnnnnnnnnnnnnnnnnnnnnnnnnnnnnnnnnnnnnnnnnnnnnnnnnnnnnnnnnnnnnnnnnnnnnnnnnnnnnnnnnnnnnnnnnnnnnnnnnnnnnnnnnnnnnnnnnnnnnnnnnnnnnnnnnnnnnnnnnnnnnnnnnnnnnnnnnnnnnnnnnnnnnnnnnnnnnnnnnnnnnnnnnnnnnnnnnnnnnnnnnnnnnnnnnnnnnnnnnnnnnnnnnnnnnnnnnnnnnnnnnnnnnnnnnnnnnnnnnnnnnnnnnnnnnnnnnnnnnnnnnnnnnnnnnnnnnnnnnnnnnnnnnnnnnnnnnnnnnnnnnnnnnnnnnnnnnnnnnnnnnnnnnnnnnnnnnnnnnnnnnnnnnnnnnnnnnnnnnnnnnnnnnnnnnnnnnnnnnnnnnnnnnnnnnnnnnnnnnnnnnnnnnnnnnnnnnnnnnnnnnnnnnnnnnnnnnnnnnnnnnnnnnnnnnnnnnnnnnnnnnnnnnnnnnnnnnnnnnnnnnnnnnnnnnnnnnnnnnnnnnnnnnnnnnnnnnnnnnnnnnnnnnnnnnnnnnnnnnnnnnnnnnnnnnnnnnnnnnnnnnnnnnnnnnnnnnnnnnnnnnnnnnnnnnnnnnnnnnnnnnnnnnnnnnnnnnnnnnnnnnnnnnnnnnnnnnnnnnnnnnnnnnnnnnnnnnnnnnnnnnnnnnnnnnnnnnnnnnnnnnnnnnnnnnnnnnnnnnnnnnnnnnnnnnnnnnnnnnnnnnnnnnnnnnnnnnnnnnnnnnnnnnnnnnnnnnnnnnnnnnnnnnnnnnnnnnnnnnnnnnnnnnnnnnnnnnnnnnnnnnnnnnnnnnnnnnnnnnnnnnnnnnnnnnnnnnnnnnnnnnnnnnnnnnnnnnnnnnnnnnnnnnnnnnnnnnnnnnnnnnnnnnnnnnnnnnnnnnnnnnnnnnnnnnnnnnnnnnnnnnnnnnnnnnnnnnnnnnnnnnnnnnnnnnnnnnnnnnnnnnnnnnnnnnnnnnnnnnnnnnnnnnnnnnnnnnnnnnnnnnnnnnnnnnnnnnnnnnnnnnnnnnnnnnnnnnnnnnnnnnnnnnnnnnnnnnnnnnnnnnnnnnnnnnnnnnnnnnnnnnnnnnnnnnnnnnnnnnnnnnnnnnnnnnnnnnnnnnnnnnnnnnnnnnnnnnnnnnnnnnnnnnnnnnnnnnnnnnnnnnnnnnnnnnnnnnnnnnnnnnnnnnnnnnnnnnnnnnnnnnnnnnnnnnnnnnnnnnnnnnnnnnnnnnnnnnnnnnnnnnnnnnnnnnnnnnnnnnnnnnnnnnnnnnnnnnnnnnnnnnnnnnnnnnnnnnnnnnnnnnnnnnnnnnnnnnnnnnnnnnnnnnnnnnnnnnnnnnnnnnnnnnnnnnnnnnnnnnnnnnnnnnnnnnnnnnnnnnnnnnnnnnnnnnnnnnnnnnnnnnnnnnnnnnnnnnnnnnnnnnnnnnnnnnnnnnnnnnnnnnnnnnnnnnnnnnnnnnnnnnnnnnnnnnnnnnnnnnnnnnnnnnnnnnnnnnnnnnnnnnnnnnnnnnnnnnnnnnnnnnnnnnnnnnnnnnnnnnnnnnnnnnnnnnnnnnnnnnnnnnnnnnnnnnnnnnnnnnnnnnnnnnnnnnnnnnnnnnnnnnnnnnnnnnnnnnnnnnnnnnnnnnnnnnnnnnnnnnnnnnnnnnnnnnnnnnnnnnnnnnnnnnnnnnnnnnnnnnnnnnnnnnnnnnnnnnnnnnnnnnnnnnnnnnnnnnnnnnnnnnnnnnnnnnnnnnnnnnnnnnnnnnnnnnnnnnnnnnnnnnnnnnnnnnnnnnnnnnnnnnnnnnnnnnnnnnnnnnnnnnnnnnnnnnnnnnnnnnnnnnnnnnnnnnnnnnnnnnnnnnnnnnnnnnnnnnnnnnnnnnnnnnnnnnnnnnnnnnnnnnnnnnnnnnnnnnnnnnnnnnnnnnnnnnnnnnnnnnnnnnnnnnnnnnnnnnnnnnnnnnnnnnnnnnnnnnnnnnnnnnnnnnnnnnnnnnnnnnnnnnnnnnnnnnnnnnnnnnnnnnnnnnnnnnnnnnnnnnnnnnnnnnnnnnnnnnnnnnnnnnnnnnnnnnnnnnnnnnnnnnnnnnnnnnnnnnnnnnnnnnnnnnnnnnnnnnnnnnnnnnnnnnnnnnnnnnnnnnnnnnnnnnnnnnnnnnnnnnnnnnnnnnnnnnnnnnnnnnnnnnnnnnnnnnnnnnnnnnnnnnnnnnnnnnnnnnnnnnnnnnnnnnnnnnnnnnnnnnnnnnnnnnnnnnnnnnnnnnnnnnnnnnnnnnnnnnnnnnnnnnnnnnnnnnnnnnnnnnnnnnnnnnnnnnnnnnnnnnnnnnnnnnnnnnnnnnnnnnnnnnnnnnnnnnnnnnnnnnnnnnnnnnnnnnnnnnnnnnnnnnnnnnnnnnnnnnnnnnnnnnnnnnnnnnnnnnnnnnnnnnnnnnnnnnnnnnnnnnnnnnnnnnnnnnnnnnnnnnnnnnnnnnnnnnnnnnnnnnnnnnnnnnnnnnnnnnnnnnnnnnnnnnnnnnnnnnnnnnnnnnnnnnnnnnnnnnnnnnnnnnnnnnnnnnnnnnnnnnnnnnnnnnnnnnnnnnnnnnnnnnnnnnnnnnnnnnnnnnnnnnnnnnnnnnnnnnnnnnnnnnnnnnnnnnnnnnnnnnnnnnnnnnnnnnnnnnnnnnnnnnnnnnnnnnnnnnnnnnnnnnnnnnnnnnnnnnnnnnnnnnnnnnnnnnnnnnnnnnnnnnnnnnnnnnnnnnnnnnnnnnnnnnnnnnnnnnnnnnnnnnnnnnnnnnnnnnnnnnnnnnnnnnnnnnnnnnnnnnnnnnnnnnnnnnnnnnnnnnnnnnnnnnnnnnnnnnnnnnnnnnnnnnnnnnnnnnnnnnnnnnnnnnnnnnnnnnnnnnnnnnnnnnnnnnnnnnnnnnnnnnnnnnnnnnnnnnnnnnnnnnnnnnnnnnnnnnnnnnnnnnnnnnnnnnnnnnnnnnnnnnnnnnnnnnnnnnnnnnnnnnnnnnnnnnnnnnnnnnnnnnnnnnnnnnnnnnnnnnnnnnnnnnnnnnnnnnnnnnnnnnnnnnnnnnnnnnnnnnnnnnnnnnnnnnnnnnnnnnnnnnnnnnnnnnnnnnnnnnnnnnnnnnnnnnnnnnnnnnnnnnnnnnnnnnnnnnnnnnnnnnnnnnnnnnnnnnnnnnnnnnnnnnnnnnnnnnnnnnnnnnnnnnnnnnnnnnnnnnnnnnnnnnnnnnnnnnnnnnnnnnnnnnnnnnnnnnnnnnnnnnnnnnnnnnnnnnnnnnnnnnnnnnnnnnnnnnnnnnnnnnnnnnnnnnnnnnnnnnnnnnnnnnnnnnnnnnnnnnnnnnnnnnnnnnnnnnnnnnnnnnnnnnnnnnnnnnnnnnnnnnnnnnnnnnnnnnnnnnnnnnnnnnnnnnnnnnnnnnnnnnnnnnnnnnnnnnnnnnnnnnnnnnnnnnnnnnnnnnnnnnnnnnnnnnnnnnnnnnnnnnnnnnnnnnnnnnnnnnnnnnnnnnnnnnnnnnnnnnnnnnnnnnnnnnnnnnnnnnnnnnnnnnnnnnnnnnnnnnnnnnnnnnnnnnnnnnnnnnnnnnnnnnnnnnnnnnnnnnnnnnnnnnnnnnnnnnnnnnnnnnnnnnnnnnnnnnnnnnnnnnnnnnnnnnnnnnnnnnnnnnnnnnnnnnnnnnnnnnnnnnnnnnnnnnnnnnnnnnnnnnnnnnnnnnnnnnnnnnnnnnnnnnnnnnnnnnnnnnnnnnnnnnnnnnnnnnnnnnnnnnnnnnnnnnnnnnnnnnnnnnnnnnnnnnnnnnnnnnnnnnnnnnnnnnnnnnnnnnnnnnnnnnnnnnnnnnnnnnnnnnnnnnnnnnnnnnnnnnnnnnnnnnnnnnnnnnnnnnnnnnnnnnnnnnnnnnnnnnnnnnnnnnnnnnnnnnnnnnnnnnnnnnnnnnnnnnnnnnnnnnnnnnnnnnnnnnnnnnnnnnnnnnnnnnnnnnnnnnnnnnnnnnnnnnnnnnnnnnnnnnnnnnnnnnnnnnnnnnnnnnnnnnnnnnnnnnnnnnnnnnnnnnnnnnnnnnnnnnnnnnnnnnnnnnnnnnnnnnnnnnnnnnnnnnnnnnnnnnnnnnnnnnnnnnnnnnnnnnnnnnnnnnnnnnnnnnnnnnnnnnnnnnnnnnnnnnnnnnnnnnnnnnnnnnnnnnnnnnnnnnnnnnnnnnnnnnnnnnnnnnnnnnnnnnnnnnnnnnnnnnnnnnnnnnnnnnnnnnnnnnnnnnnnnnnnnnnnnnnnnnnnnnnnnnnnnnnnnnnnnnnnnnnnnnnnnnnnnnnnnnnnnnnnnnnnnnnnnnnnnnnnnnnnnnnnnnnnnnnnnnnnnnnnnnnnnnnnnnnnnnnnnnnnnnnnnnnnnnnnnnnnnnnnnnnnnnnnnnnnnnnnnnnnnnnnnnnnnnnnnnnnnnnnnnnnnnnnnnnnnnnnnnnnnnnnnnnnnnnnnnnnnnnnnnnnnnnnnnnnnnnnnnnnnnnnnnnnnnnnnnnnnnnnnnnnnnnnnnnnnnnnnnnnnnnnnnnnnnnnnnnnnnnnnnnnnnnnnnnnnnnnnnnnnnnnnnnnnnnnnnnnnnnnnnnnnnnnnnnnnnnnnnnnnnnnnnnnnnnnnnnnnnnnnnnnnnnnnnnnnnnnnnnnnnnnnnnnnnnnnnnnnnnnnnnnnnnnnnnnnnnnnnnnnnnnnnnnnnnnnnnnnnnnnnnnnnnnnnnnnnnnnnnnnnnnnnnnnnnnnnnnnnnnnnnnnnnnnnnnnnnnnnnnnnnnnnnnnnnnnnnnnnnnnnnnnnnnnnnnnnnnnnnnnnnnnnnnnnnnnnnnnnnnnnnnnnnnnnnnnnnnnnnnnnnnnnnnnnnnnnnnnnnnnnnnnnnnnnnnnnnnnnnnnnnnnnnnnnnnnnnnnnnnnnnnnnnnnnnnnnnnnnnnnnnnnnnnnnnnnnnnnnnnnnnnnnnnnnnnnnnnnnnnnnnnnnnnnnnnnnnnnnnnnnnnnnnnnnnnnnnnnnnnnnnnnnnnnnnnnnnnnnnnnnnnnnnnnnnnnnnnnnnnnnnnnnnnnnnnnnnnnnnnnnnnnnnnnnnnnnnnnnnnnnnnnnnnnnnnnnnnnnnnnnnnnnnnnnnnnnnnnnnnnnnnnnnnnnnnnnnnnnnnnnnnnnnnnnnnnnnnnnnnnnnnnnnnnnnnnnnnnnnnnnnnnnnnnnnnnnnnnnnnnnnnnnnnnnnnnnnnnnnnnnnnnnnnnnnnnnnnnnnnnnnnnnnnnnnnnnnnnnnnnnnnnnnnnnnnnnnnnnnnnnnnnnnnnnnnnnnnnnnnnnnnnnnnnnnnnnnnnnnnnnnnnnnnnnnnnnnnnnnnnnnnnnnnnnnnnnnnnnnnnnnnnnnnnnnnnnnnnnnnnnnnnnnnnnnnnnnnnnnnnnnnnnnnnnnnnnnnnnnnnnnnnnnnnnnnnnnnnnnnnnnnnnnnnnnnnnnnnnnnnnnnnnnnnnnnnnnnnnnnnnnnnnnnnnnnnnnnnnnnnnnnnnnnnnnnnnnnnnnnnnnnnnnnnnnnnnnnnnnnnnnnnnnnnnnnnnnnnnnnnnnnnnnnnnnnnnnnnnnnnnnnnnnnnnnnnnnnnnnnnnnnnnnnnnnnnnnnnnnnnnnnnnnnnnnnnnnnnnnnnnnnnnnnnnnnnnnnnnnnnnnnnnnnnnnnnnnnnnnnnnnnnnnnnnnnnnnnnnnnnnnnnnnnnnnnnnnnnnnnnnnnnnnnnnnnnnnnnnnnnnnnnnnnnnnnnnnnnnnnnnnnnnnnnnnnnnnnnnnnnnnnnnnnnnnnnnnnnnnnnnnnnnnnnnnnnnnnnnnnnnnnnnnnnnnnnnnnnnnnnnnnnnnnnnnnnnnnnnnnnnnnnnnnnnnnnnnnnnnnnnnnnnnnnnnnnnnnnnnnnnnnnnnnnnnnnnnnnnnnnnnnnnnnnnnnnnnnnnnnnnnnnnnnnnnnnnnnnnnnnnnnnnnnnnnnnnnnnnnnnnnnnnnnnnnnnnnnnnnnnnnnnnnnnnnnnnnnnnnnnnnnnnnnnnnnnnnnnnnnnnnnnnnnnnnnnnnnnnnnnnnnnnnnnnnnnnnnnnnnnnnnnnnnnnnnnnnnnnnnnnnnnnnnnnnnnnnnnnnnnnnnnnnnnnnnnnnnnnnnnnnnnnnnnnnnnnnnnnnnnnnnnnnnnnnnnnnnnnnnnnnnnnnnnnnnnnnnnnnnnnnnnnnnnnnnnnnnnnnnnnnnnnnnnnnnnnnnnnnnnnnnnnnnnnnnnnnnnnnnnnnnnnnnnnnnnnnnnnnnnnnnnnnnnnnnnnnnnnnnnnnnnnnnnnnnnnnnnnnnnnnnnnnnnnnnnnnnnnnnnnnnnnnnnnnnnnnnnnnnnnnnnnnnnnnnnnnnnnnnnnnnnnnnnnnnnnnnnnnnnnnnnnnnnnnnnnnnnnnnnnnnnnnnnnnnnnnnnnnnnnnnnnnnnnnnnnnnnnnnnnnnnnnnnnnnnnnnnnnnnnnnnnnnnnnnnnnnnnnnnnnnnnnnnnnnnnnnnnnnnnnnnnnnnnnnnnnnnnnnnnnnnnnnnnnnnnnnnnnnnnnnnnnnnnnnnnnnnnnnnnnnnnnnnnnnnnnnnnnnnnnnnnnnnnnnnnnnnnnnnnnnnnnnnnnnnnnnnnnnnnnnnnnnnnnnnnnnnnnnnnnnnnnnnnnnnnnnnnnnnnnnnnnnnnnnnnnnnnnnnnnnnnnnnnnnnnnnnnnnnnnnnnnnnnnnnnnnnnnnnnnnnnnnnnnnnnnnnnnnnnnnnnnnnnnnnnnnnnnnnnnnnnnnnnnnnnnnnnnnnnnnnnnnnnnnnnnnnnnnnnnnnnnnnnnnnnnnnnnnnnnnnnnnnnnnnnnnnnnnnnnnnnnnnnnnnnnnnnnnnnnnnnnnnnnnnnnnnnnnnnnnnnnnnnnnnnnnnnnnnnnnnnnnnnnnnnnnnnnnnnnnnnnnnnnnnnnnnnnnnnnnnnnnnnnnnnnnnnnnnnnnnnnnnnnnnnnnnnnnnnnnnnnnnnnnnnnnnnnnnnnnnnnnnnnnnnnnnnnnnnnnnnnnnnnnnnnnnnnnnnnnnnnnnnnnnnnnnnnnnnnnnnnnnnnnnnnnnnnnnnnnnnnnnnnnnnnnnnnnnnnnnnnnnnnnnnnnnnnnnnnnnnnnnnnnnnnnnnnnnnnnnnnnnnnnnnnnnnnnnnnnnnnnnnnnnnnnnnnnnnnnnnnnnnnnnnnnnnnnnnnnnnnnnnnnnnnnnnnnnnnnnnnnnnnnnnnnnnnnnnnnnnnnnnnnnnnnnnnnnnnnnnnnnnnnnnnnnnnnnnnnnnnnnnnnnnnnnnnnnnnnnnnnnnnnnnnnnnnnnnnnnnnnnnnnnnnnnnnnnnnnnnnnnnnnnnnnnnnnnnnnnnnnnnnnnnnnnnnnnnnnnnnnnnnnnnnnnnnnnnnnnnnnnnnnnnnnnnnnnnnnnnnnnnnnnnnnnnnnnnnnnnnnnnnnnnnnnnnnnnnnnnnnnnnnnnnnnnnnnnnnnnnnnnnnnnnnnnnnnnnnnnnnnnnnnnnnnnnnnnnnnnnnnnnnnnnnnnnnnnnnnnnnnnnnnnnnnnnnnnnnnnnnnnnnnnnnnnnnnnnnnnnnnnnnnnnnnnnnnnnnnnnnnnnnnnnnnnnnnnnnnnnnnnnnnnnnnnnnnnnnnnnnnnnnnnnnnnnnnnnnnnnnnnnnnnnnnnnnnnnnnnnnnnnnnnnnnnnnnnnnnnnnnnnnnnnnnnnnnnnnnnnnnnnnnnnnnnnnnnnnnnnnnnnnnnnnnnnnnnnnnnnnnnnnnnnnnnnnnnnnnnnnnnnnnnnnnnnnnnnnnnnnnnnnnnnnnnnnnnnnnnnnnnnnnnnnnnnnnnnnnnnnnnnnnnnnnnnnnnnnnnnnnnnnnnnnnnnnnnnnnnnnnnnnnnnnnnnnnnnnnnnnnnnnnnnnnnnnnnnnnnnnnnnnnnnnnnnnnnnnnnnnnnnnnnnnnnnnnnnnnnnnnnnnnnnnnnnnnnnnnnnnnnnnnnnnnnnnnnnnnnnnnnnnnnnnnnnnnnnnnnnnnnnnnnnnnnnnnnnnnnnnnnnnnnnnnnnnnnnnnnnnnnnnnnnnnnnnnnnnnnnnnnnnnnnnnnnnnnnnnnnnnnnnnnnnnnnnnnnnnnnnnnnnnnnnnnnnnnnnnnnnnnnnnnnnnnnnnnnnnnnnnnnnnnnnnnnnnnnnnnnnnnnnnnnnnnnnnnnnnnnnnnnnnnnnnnnnnnnnnnnnnnnnnnnnnnnnnnnnnnnnnnnnnnnnnnnnnnnnnnnnnnnnnnnnnnnnnnnnnnnnnnnnnnnnnnnnnnnnnnnnnnnnnnnnnnnnnnnnnnnnnnnnnnnnnnnnnnnnnnnnnnnnnnnnnnnnnnnnnnnnnnnnnnnnnnnnnnnnnnnnnnnnnnnnnnnnnnnnnnnnnnnnnnnnnnnnnnnnnnnnnnnnnnnnnnnnnnnnnnnnnnnnnnnnnnnnnnnnnnnnnnnnnnnnnnnnnnnnnnnnnnnnnnnnnnnnnnnnnnnnnnnnnnnnnnnnnnnnnnnnnnnnnnnnnnnnnnnnnnnnnnnnnnnnnnnnnnnnnnnnnnnnnnnnnnnnnnnnnnnnnnnnnnnnnnnnnnnnnnnnnnnnnnnnnnnnnnnnnnnnnnnnnnnnnnnnnnnnnnnnnnnnnnnnnnnnnnnnnnnnnnnnnnnnnnnnnnnnnnnnnnnnnnnnnnnnnnnnnnnnnnnnnnnnnnnnnnnnnnnnnnnnnnnnnnnnnnnnnnnnnnnnnnnnnnnnnnnnnnnnnnnnnnnnnnnnnnnnnnnnnnnnnnnnnnnnnnnnnnnnnnnnnnnnnnnnnnnnnnnnnnnnnnnnnnnnnnnnnnnnnnnnnnnnnnnnnnnnnnnnnnnnnnnnnnnnnnnnnnnnnnnnnnnnnnnnnnnnnnnnnnnnnnnnnnnnnnnnnnnnnnnnnnnnnnnnnnnnnnnnnnnnnnnnnnnnnnnnnnnnnnnnnnnnnnnnnnnnnnnnnnnnnnnnnnnnnnnnnnnnnnnnnnnnnnnnnnnnnnnnnnnnnnnnnnnnnnnnnnnnnnnnnnnnnnnnnnnnnnnnnnnnnnnnnnnnnnnnnnnnnnnnnnnnnnnnnnnnnnnnnnnnnnnnnnnnnnnnnnnnnnnnnnnnnnnnnnnnnnnnnnnnnnnnnnnnnnnnnnnnnnnnnnnnnnnnnnnnnnnnnnnnnnnnnnnnnnnnnnnnnnnnnnnnnnnnnnnnnnnnnnnnnnnnnnnnnnnnnnnnnnnnnnnnnnnnnnnnnnnnnnnnnnnnnnnnnnnnnnnnnnnnnnnnnnnnnnnnnnnnnnnnnnnnnnnnnnnnnnnnnnnnnnnnnnnnnnnnnnnnnnnnnnnnnnnnnnnnnnnnnnnnnnnnnnnnnnnnnnnnnnnnnnnnnnnnnnnnnnnnnnnnnnnnnnnnnnnnnnnnnnnnnnnnnnnnnnnnnnnnnnnnnnnnnnnnnnnnnnnnnnnnnnnnnnnnnnnnnnnnnnnnnnnnnnnnnnnnnnnnnnnnnnnnnnnnnnnnnnnnnnnnnnnnnnnnnnnnnnnnnnnnnnnnnnnnnnnnnnnnnnnnnnnnnnnnnnnnnnnnnnnnnnnnnnnnnnnnnnnnnnnnnnnnnnnnnnnnnnnnnnnnnnnnnnnnnnnnnnnnnnnnnnnnnnnnnnnnnnnnnnnnnnnnnnnnnnnnnnnnnnnnnnnnnnnnnnnnnnnnnnnnnnnnnnnnnnnnnnnnnnnnnnnnnnnnnnnnnnnnnnnnnnnnnnnnnnnnnnnnnnnnnnnnnnnnnnnnnnnnnnnnnnnnnnnnnnnnnnnnnnnnnnnnnnnnnnnnnnnnnnnnnnnnnnnnnnnnnnnnnnnnnnnnnnnnnnnnnnnnnnnnnnnnnnnnnnnnnnnnnnnnnnnnnnnnnnnnnnnnnnnnnnnnnnnnnnnnnnnnnnnnnnnnnnnnnnnnnnnnnnnnnnnnnnnnnnnnnnnnnnnnnnnnnnnnnnnnnnnnnnnnnnnnnnnnnnnnnnnnnnnnnnnnnnnnnnnnnnnnnnnnnnnnnnnnnnnnnnnnnnnnnnnnnnnnnnnnnnnnnnnnnnnnnnnnnnnnnnnnnnnnnnnnnnnnnnnnnnnnnnnnnnnnnnnnnnnnnnnnnnnnnnnnnnnnnnnnnnnnnnnnnnnnnnnnnnnnnnnnnnnnnnnnnnnnnnnnnnnnnnnnnnnnnnnnnnnnnnnnnnnnnnnnnnnnnnnnnnnnnnnnnnnnnnnnnnnnnnnnnnnnnnnnnnnnnnnnnnnnnnnnnnnnnnnnnnnnnnnnnnnnnnnnnnnnnnnnnnnnnnnnnnnnnnnnnnnnnnnnnnnnnnnnnnnnnnnnnnnnnnnnnnnnnnnnnnnnnnnnnnnnnnnnnnnnnnnnnnnnnnnnnnnnnnnnnnnnnnnnnnnnnnnnnnnnnnnnnnnnnnnnnnnnnnnnnnnnnnnnnnnnnnnnnnnnnnnnnnnnnnnnnnnnnnnnnnnnnnnnnnnnnnnnnnnnnnnnnnnnnnnnnnnnnnnnnnnnnnnnnnnnnnnnnnnnnnnnnnnnnnnnnnnnnnnnnnnnnnnnnnnnnnnnnnnnnnnnnnnnnnnnnnnnnnnnnnnnnnnnnnnnnnnnnnnnnnnnnnnnnnnnnnnnnnnnnnnnnnnnnnnnnnnnnnnnnnnnnnnnnnnnnnnnnnnnnnnnnnnnnnnnnnnnnnnnnnnnnnnnnnnnnnnnnnnnnnnnnnnnnnnnnnnnnnnnnnnnnnnnnnnnnnnnnnnnnnnnnnnnnnnnnnnnnnnnnnnnnnnnnnnnnnnnnnnnnnnnnnnnnnnnnnnnnnnnnnnnnnnnnnnnnnnnnnnnnnnnnnnnnnnnnnnnnnnnnnnnnnnnnnnnnnnnnnnnnnnnnnnnnnnnnnnnnnnnnnnnnnnnnnnnnnnnnnnnnnnnnnnnnnnnnnnnnnnnnnnnnnnnnnnnnnnnnnnnnnnnnnnnnnnnnnnnnnnnnnnnnnnnnnnnnnnnnnnnnnnnnnnnnnnnnnnnnnnnnnnnnnnnnnnnnnnnnnnnnnnnnnnnnnnnnnnnnnnnnnnnnnnnnnnnnnnnnnnnnnnnnnnnnnnnnnnnnnnnnnnnnnnnnnnnnnnnnnnnnnnnnnnnnnnnnnnnnnnnnnnnnnnnnnnnnnnnnnnnnnnnnnnnnnnnnnnnnnnnnnnnnnnnnnnnnnnnnnnnnnnnnnnnnnnnnnnnnnnnnnnnnnnnnnnnnnnnnnnnnnnnnnnnnnnnnnnnnnnnnnnnnnnnnnnnnnnnnnnnnnnnnnnnnnnnnnnnnnnnnnnnnnnnnnnnnnnnnnnnnnnnnnnnnnnnnnnnnnnnnnnnnnnnnnnnnnnnnnnnnnnnnnnnnnnnnnnnnnnnnnnnnnnnnnnnnnnnnnnnnnnnnnnnnnnnnnnnnnnnnnnnnnnnnnnnnnnnnnnnnnnnnnnnnnnnnnnnnnnnnnnnnnnnnnnnnnnnnnnnnnnnnnnnnnnnnnnnnnnnnnnnnnnnnnnnnnnnnnnnnnnnnnnnnnnnnnnnnnnnnnnnnnnnnnnnnnnnnnnnnnnnnnnnnnnnnnnnnnnnnnnnnnnnnnnnnnnnnnnnnnnnnnnnnnnnnnnnnnnnnnnnnnnnnnnnnnnnnnnnnnnnnnnnnnnnnnnnnnnnnnnnnnnnnnnnnnnnnnnnnnnnnnnnnnnnnnnnnnnnnnnnnnnnnnnnnnnnnnnnnnnnnnnnnnnnnnnnnnnnnnnnnnnnnnnnnnnnnnnnnnnnnnnnnnnnnnnnnnnnnnnnnnnnnnnnnnnnnnnnnnnnnnnnnnnnnnnnnnnnnnnnnnnnnnnnnnnnnnnnnnnnnnnnnnnnnnnnnnnnnnnnnnnnnnnnnnnnnnnnnnnnnnnnnnnnnnnnnnnnnnnnnnnnnnnnnnnnnnnnnnnnnnnnnnnnnnnnnnnnnnnnnnnnnnnnnnnnnnnnnnnnnnnnnnnnnnnnnnnnnnnnnnnnnnnnnnnnnnnnnnnnnnnnnnnnnnnnnnnnnnnnnnnnnnnnnnnnnnnnnnnnnnnnnnnnnnnnnnnnnnnnnnnnnnnnnnnnnnnnnnnnnnnnnnnnnnnnnnnnnnnnnnnnnnnnnnnnnnnnnnnnnnnnnnnnnnnnnnnnnnnnnnnnnnnnnnnnnnnnnnnnnnnnnnnnnnnnnnnnnnnnnnnnnnnnnnnnnnnnnnnnnnnnnnnnnnnnnnnnnnnnnnnnnnnnnnnnnnnnnnnnnnnnnnnnnnnnnnnnnnnnnnnnnnnnnnnnnnnnnnnnnnnnnnnnnnnnnnnnnnnnnnnnnnnnnnnnnnnnnnnnnnnnnnnnnnnnnnnnnnnnnnnnnnnnnnnnnnnnnnnnnnnnnnnnnnnnnnnnnnnnnnnnnnnnnnnnnnnnnnnnnnnnnnnnnnnnnnnnnnnnnnnnnnnnnnnnnnnnnnnnnnnnnnnnnnnnnnnnnnnnnnnnnnnnnnnnnnnnnnnnnnnnnnnnnnnnnnnnnnnnnnnnnnnnnnnnnnnnnnnnnnnnnnnnnnnnnnnnnnnnnnnnnnnnnnnnnnnnnnnnnnnnnnnnnnnnnnnnnnnnnnnnnnnnnnnnnnnnnnnnnnnnnnnnnnnnnnnnnnnnnnnnnnnnnnnnnnnnnnnnnnnnnnnnnnnnnnnnnnnnnnnnnnnnnnnnnnnnnnnnnnnnnnnnnnnnnnnnnnnnnnnnnnnnnnnnnnnnnnnnnnnnnnnnnnnnnnnnnnnnnnnnnnnnnnnnnnnnnnnnnnnnnnnnnnnnnnnnnnnnnnnnnnnnnnnnnnnnnnnnnnnnnnnnnnnnnnnnnnnnnnnnnnnnnnnnnnnnnnnnnnnnnnnnnnnnnnnnnnnnnnnnnnnnnnnnnnnnnnnnnnnnnnnnnnnnnnnnnnnnnnnnnnnnnnnnnnnnnnnnnnnnnnnnnnnnnnnnnnnnnnnnnnnnnnnnnnnnnnnnnnnnnnnnnnnnnnnnnnnnnnnnnnnnnnnnnnnnnnnnnnnnnnnnnnnnnnnnnnnnnnnnnnnnnnnnnnnnnnnnnnnnnnnnnnnnnnnnnnnnnnnnnnnnnnnnnnnnnnnnnnnnnnnnnnnnnnnnnnnnnnnnnnnnnnnnnnnnnnnnnnnnnnnnnnnnnnnnnnnnnnnnnnnnnnnnnnnnnnnnnnnnnnnnnnnnnnnnnnnnnnnnnnnnnnnnnnnnnnnnnnnnnnnnnnnnnnnnnnnnnnnnnnnnnnnnnnnnnnnnnnnnnnnnnnnnnnnnnnnnnnnnnnnnnnnnnnnnnnnnnnnnnnnnnnnnnnnnnnnnnnnnnnnnnnnnnnnnnnnnnnnnnnnnnnnnnnnnnnnnnnnnnnnnnnnnnnnnnnnnnnnnnnnnnnnnnnnnnnnnnnnnnnnnnnnnnnnnnnnnnnnnnnnnnnnnnnnnnnnnnnnnnnnnnnnnnnnnnnnnnnnnnnnnnnnnnnnnnnnnnnnnnnnnnnnnnnnnnnnnnnnnnnnnnnnnnnnnnnnnnnnnnnnnnnnnnnnnnnnnnnnnnnnnnnnnnnnnnnnnnnnnnnnnnnnnnnnnnnnnnnnnnnnnnnnnnnnnnnnnnnnnnnnnnnnnnnnnnnnnnnnnnnnnnnnnnnnnnnnnnnnnnnnnnnnnnnnnnnnnnnnnnnnnnnnnnnnnnnnnnnnnnnnnnnnnnnnnnnnnnnnnnnnnnnnnnnnnnnnnnnnnnnnnnnnnnnnnnnnnnnnnnnnnnnnnnnnnnnnnnnnnnnnnnnnnnnnnnnnnnnnnnnnnnnnnnnnnnnnnnnnnnnnnnnnnnnnnnnnnnnnnnnnnnnnnnnnnnnnnnnnnnnnnnnnnnnnnnnnnnnnnnnnnnnnnnnnnnnnnnnnnnnnnnnnnnnnnnnnnnnnnnnnnnnnnnnnnnnnnnnnnnnnnnnnnnnnnnnnnnnnnnnnnnnnnnnnnnnnnnnnnnnnnnnnnnnnnnnnnnnnnnnnnnnnnnnnnnnnnnnnnnnnnnnnnnnnnnnnnnnnnnnnnnnnnnnnnnnnnnnnnnnnnnnnnnnnnnnnnnnnnnnnnnnnnnnnnnnnnnnnnnnnnnnnnnnnnnnnnnnnnnnnnnnnnnnnnnnnnnnnnnnnnnnnnnnnnnnnnnnnnnnnnnnnnnnnnnnnnnnnnnnnnnnnnnnnnnnnnnnnnnnnnnnnnnnnnnnnnnnnnnnnnnnnnnnnnnnnnnnnnnnnnnnnnnnnnnnnnnnnnnnnnnnnnnnnnnnnnnnnnnnnnnnnnnnnnnnnnnnnnnnnnnnnnnnnnnnnnnnnnnnnnnnnnnnnnnnnnnnnnnnnnnnnnnnnnnnnnnnnnnnnnnnnnnnnnnnnnnnnnnnnnnnnnnnnnnnnnnnnnnnnnnnnnnnnnnnnnnnnnnnnnnnnnnnnnnnnnnnnnnnnnnnnnnnnnnnnnnnnnnnnnnnnnnnnnnnnnnnnnnnnnnnnnnnnnnnnnnnnnnnnnnnnnnnnnnnnnnnnnnnnnnnnnnnnnnnnnnnnnnnnnnnnnnnnnnnnnnnnnnnnnnnnnnnnnnnnnnnnnnnnnnnnnnnnnnnnnnnnnnnnnnnnnnnnnnnnnnnnnnnnnnnnnnnnnnnnnnnnnnnnnnnnnnnnnnnnnnnnnnnnnnnnnnnnnnnnnnnnnnnnnnnnnnnnnnnnnnnnnnnnnnnnnnnnnnnnnnnnnnnnnnnnnnnnnnnnnnnnnnnnnnnnnnnnnnnnnnnnnnnnnnnnnnnnnnnnnnnnnnnnnnnnnnnnnnnnnnnnnnnnnnnnnnnnnnnnnnnnnnnnnnnnnnnnnnnnnnnnnnnnnnnnnnnnnnnnnnnnnnnnnnnnnnnnnnnnnnnnnnnnnnnnnnnnnnnnnnnnnnnnnnnnnnnnnnnnnnnnnnnnnnnnnnnnnnnnnnnnnnnnnnnnnnnnnnnnnnnnnnnnnnnnnnnnnnnnnnnnnnnnnnnnnnnnnnnnnnnnnnnnnnnnnnnnnnnnnnnnnnnnnnnnnnnnnnnnnnnnnnnnnnnnnnnnnnnnnnnnnnnnnnnnnnnnnnnnnnnnnnnnnnnnnnnnnnnnnnnnnnnnnnnnnnnnnnnnnnnnnnnnnnnnnnnnnnnnnnnnnnnnnnnnnnnnnnnnnnnnnnnnnnnnnnnnnnnnnnnnnnnnnnnnnnnnnnnnnnnnnnnnnnnnnnnnnnnnnnnnnnnnnnnnnnnnnnnnnnnnnnnnnnnnnnnnnnnnnnnnnnnnnnnnnnnnnnnnnnnnnnnnnnnnnnnnnnnnnnnnnnnnnnnnnnnnnnnnnnnnnnnnnnnnnnnnnnnnnnnnnnnnnnnnnnnnnnnnnnnnnnnnnnnnnnnnnnnnnnnnnnnnnnnnnnnnnnnnnnnnnnnnnnnnnnnnnnnnnnnnnnnnnnnnnnnnnnnnnnnnnnnnnnnnnnnnnnnnnnnnnnnnnnnnnnnnnnnnnnnnnnnnnnnnnnnnnnnnnnnnnnnnnnnnnnnnnnnnnnnnnnnnnnnnnnnnnnnnnnnnnnnnnnnnnnnnnnnnnnnnnnnnnnnnnnnnnnnnnnnnnnnnnnnnnnnnnnnnnnnnnnnnnnnnnnnnnnnnnnnnnnnnnnnnnnnnnnnnnnnnnnnnnnnnnnnnnnnnnnnnnnnnnnnnnnnnnnnnnnnnnnnnnnnnnnnnnnnnnnnnnnnnnnnnnnnnnnnnnnnnnnnnnnnnnnnnnnnnnnnnnnnnnnnnnnnnnnnnnnnnnnnnnnnnnnnnnnnnnnnnnnnnnnnnnnnnnnnnnnnnnnnnnnnnnnnnnnnnnnnnnnnnnnnnnnnnnnnnnnnnnnnnnnnnnnnnnnnnnnnnnnnnnnnnnnnnnnnnnnnnnnnnnnnnnnnnnnnnnnnnnnnnnnnnnnnnnnnnnnnnnnnnnnnnnnnnnnnnnnnnnnnnnnnnnnnnnnnnnnnnnnnnnnnnnnnnnnnnnnnnnnnnnnnnnnnnnnnnnnnnnnnnnnnnnnnnnnnnnnnnnnnnnnnnnnnnnnnnnnnnnnnnnnnnnnnnnnnnnnnnnnnnnnnnnnnnnnnnnnnnnnnnnnnnnnnnnnnnnnnnnnnnnnnnnnnnnnnnnnnnnnnnnnnnnnnnnnnnnnnnnnnnnnnnnnnnnnnnnnnnnnnnnnnnnnnnnnnnnnnnnnnnnnnnnnnnnnnnnnnnnnnnnnnnnnnnnnnnnnnnnnnnnnnnnnnnnnnnnnnnnnnnnnnnnnnnnnnnnnnnnnnnnnnnnnnnnnnnnnnnnnnnnnnnnnnnnnnnnnnnnnnnnnnnnnnnnnnnnnnnnnnnnnnnnnnnnnnnnnnnnnnnnnnnnnnnnnnnnnnnnnnnnnnnnnnnnnnnnnnnnnnnnnnnnnnnnnnnnnnnnnnnnnnnnnnnnnnnnnnnnnnnnnnnnnnnnnnnnnnnnnnnnnnnnnnnnnnnnnnnnnnnnnnnnnnnnnnnnnnnnnnnnnnnnnnnnnnnnnnnnnnnnnnnnnnnnnnnnnnnnnnnnnnnnnnnnnnnnnnnnnnnnnnnnnnnnnnnnnnnnnnnnnnnnnnnnnnnnnnnnnnnnnnnnnnnnnnnnnnnnnnnnnnnnnnnnnnnnnnnnnnnnnnnnnnnnnnnnnnnnnnnnnnnnnnnnnnnnnnnnnnnnnnnnnnnnnnnnnnnnnnnnnnnnnnnnnnnnnnnnnnnnnnnnnnnnnnnnnnnnnnnnnnnnnnnnnnnnnnnnnnnnnnnnnnnnnnnnnnnnnnnnnnnnnnnnnnnnnnnnnnnnnnnnnnnnnnnnnnnnnnnnnnnnnnnnnnnnnnnnnnnnnnnnnnnnnnnnnnnnnnnnnnnnnnnnnnnnnnnnnnnnnnnnnnnnnnnnnnnnnnnnnnnnnnnnnnnnnnnnnnnnnnnnnnnnnnnnnnnnnnnnnnnnnnnnnnnnnnnnnnnnnnnnnnnnnnnnnnnnnnnnnnnnnnnnnnnnnnnnnnnnnnnnnnnnnnnnnnnnnnnnnnnnnnnnnnnnnnnnnnnnnnnnnnnnnnnnnnnnnnnnnnnnnnnnnnnnnnnnnnnnnnnnnnnnnnnnnnnnnnnnnnnnnnnnnnnnnnnnnnnnnnnnnnnnnnnnnnnnnnnnnnnnnnnnnnnnnnnnnnnnnnnnnnnnnnnnnnnnnnnnnnnnnnnnnnnnnnnnnnnnnnnnnnnnnnnnnnnnnnnnnnnnnnnnnnnnnnnnnnnnnnnnnnnnnnnnnnnnnnnnnnnnnnnnnnnnnnnnnnnnnnnnnnnnnnnnnnnnnnnnnnnnnnnnnnnnnnnnnnnnnnnnnnnnnnnnnnnnnnnnnnnnnnnnnnnnnnnnnnnnnnnnnnnnnnnnnnnnnnnnnnnnnnnnnnnnnnnnnnnnnnnnnnnnnnnnnnnnnnnnnnnnnnnnnnnnnnnnnnnnnnnnnnnnnnnnnnnnnnnnnnnnnnnnnnnnnnnnnnnnnnnnnnnnnnnnnnnnnnnnnnnnnnnnnnnnnnnnnnnnnnnnnnnnnnnnnnnnnnnnnnnnnnnnnnnnnnnnnnnnnnnnnnnnnnnnnnnnnnnnnnnnnnnnnnnnnnnnnnnnnnnnnnnnnnnnnnnnnnnnnnnnnnnnnnnnnnnnnnnnnnnnnnnnnnnnnnnnnnnnnnnnnnnnnnnnnnnnnnnnnnnnnnnnnnnnnnnnnnnnnnnnnnnnnnnnnnnnnnnnnnnnnnnnnnnnnnnnnnnnnnnnnnnnnnnnnnnnnnnnnnnnnnnnnnnnnnnnnnnnnnnnnnnnnnnnnnnnnnnnnnnnnnnnnnnnnnnnnnnnnnnnnnnnnnnnnnnnnnnnnnnnnnnnnnnnnnnnnnnnnnnnnnnnnnnnnnnnnnnnnnnnnnnnnnnnnnnnnnnnnnnnnnnnnnnnnnnnnnnnnnnnnnnnnnnnnnnnnnnnnnnnnnnnnnnnnnnnnnnnnnnnnnnnnnnnnnnnnnnnnnnnnnnnnnnnnnnnnnnnnnnnnnnnnnnnnnnnnnnnnnnnnnnnnnnnnnnnnnnnnnnnnnnnnnnnnnnnnnnnnnnnnnnnnnnnnnnnnnnnnnnnnnnnnnnnnnnnnnnnnnnnnnnnnnnnnnnnnnnnnnnnnnnnnnnnnnnnnnnnnnnnnnnnnnnnnnnnnnnnnnnnnnnnnnnnnnnnnnnnnnnnnnnnnnnnnnnnnnnnnnnnnnnnnnnnnnnnnnnnnnnnnnnnnnnnnnnnnnnnnnnnnnnnnnnnnnnnnnnnnnnnnnnnnnnnnnnnnnnnnnnnnnnnnnnnnnnnnnnnnnnnnnnnnnnnnnnnnnnnnnnnnnnnnnnnnnnnnnnnnnnnnnnnnnnnnnnnnnnnnnnnnnnnnnnnnnnnnnnnnnnnnnnnnnnnnnnnnnnnnnnnnnnnnnnnnnnnnnnnnnnnnnnnnnnnnnnnnnnnnnnnnnnnnnnnnnnnnnnnnnnnnnnnnnnnnnnnnnnnnnnnnnnnnnnnnnnnnnnnnnnnnnnnnnnnnnnnnnnnnnnnnnnnnnnnnnnnnnnnnnnnnnnnnnnnnnnnnnnnnnnnnnnnnnnnnnnnnnnnnnnnnnnnnnnnnnnnnnnnnnnnnnnnnnnnnnnnnnnnnnnnnnnnnnnnnnnnnnnnnnnnnnnnnnnnnnnnnnnnnnnnnnnnnnnnnnnnnnnnnnnnnnnnnnnnnnnnnnnnnnnnnnnnnnnnnnnnnnnnnnnnnnnnnnnnnnnnnnnnnnnnnnnnnnnnnnnnnnnnnnnnnnnnnnnnnnnnnnnnnnnnnnnnnnnnnnnnnnnnnnnnnnnnnnnnnnnnnnnnnnnnnnnnnnnnnnnnnnnnnnnnnnnnnnnnnnnnnnnnnnnnnnnnnnnnnnnnnnnnnnnnnnnnnnnnnnnnnnnnnnnnnnnnnnnnnnnnnnnnnnnnnnnnnnnnnnnnnnnnnnnnnnnnnnnnnnnnnnnnnnnnnnnnnnnnnnnnnnnnnnnnnnnnnnnnnnnnnnnnnnnnnnnnnnnnnnnnnnnnnnnnnnnnnnnnnnnnnnnnnnnnnnnnnnnnnnnnnnnnnnnnnnnnnnnnnnnnnnnnnnnnnnnnnnnnnnnnnnnnnnnnnnnnnnnnnnnnnnnnnnnnnnnnnnnnnnnnnnnnnnnnnnnnnnnnnnnnnnnnnnnnnnnnnnnnnnnnnnnnnnnnnnnnnnnnnnnnnnnnnnnnnnnnnnnnnnnnnnnnnnnnnnnnnnnnnnnnnnnnnnnnnnnnnnnnnnnnnnnnnnnnnnnnnnnnnnnnnnnnnnnnnnnnnnnnnnnnnnnnnnnnnnnnnnnnnnnnnnnnnnnnnnnnnnnnnnnnnnnnnnnnnnnnnnnnnnnnnnnnnnnnnnnnnnnnnnnnnnnnnnnnnnnnnnnnnnnnnnnnnnnnnnnnnnnnnnnnnnnnnnnnnnnnnnnnnnnnnnnnnnnnnnnnnnnnnnnnnnnnnnnnnnnnnnnnnnnnnnnnnnnnnnnnnnnnnnnnnnnnnnnnnnnnnnnnnnnnnnnnnnnnnnnnnnnnnnnnnnnnnnnnnnnnnnnnnnnnnnnnnnnnnnnnnnnnnnnnnnnnnnnnnnnnnnnnnnnnnnnnnnnnnnnnnnnnnnnnnnnnnnnnnnnnnnnnnnnnnnnnnnnnnnnnnnnnnnnnnnnnnnnnnnnnnnnnnnnnnnnnnnnnnnnnnnnnnnnnnnnnnnnnnnnnnnnnnnnnnnnnnnnnnnnnnnnnnnnnnnnnnnnnnnnnnnnnnnnnnnnnnnnnnnnnnnnnnnnnnnnnnnnnnnnnnnnnnnnnnnnnnnnnnnnnnnnnnnnnnnnnnnnnnnnnnnnnnnnnnnnnnnnnnnnnnnnnnnnnnnnnnnnnnnnnnnnnnnnnnnnnnnnnnnnnnnnnnnnnnnnnnnnnnnnnnnnnnnnnnnnnnnnnnnnnnnnnnnnnnnnnnnnnnnnnnnnnnnnnnnnnnnnnnnnnnnnnnnnnnnnnnnnnnnnnnnnnnnnnnnnnnnnnnnnnnnnnnnnnnnnnnnnnnnnnnnnnnnnnnnnnnnnnnnnnnnnnnnnnnnnnnnnnnnnnnnnnnnnnnnnnnnnnnnnnnnnnnnnnnnnnnnnnnnnnnnnnnnnnnnnnnnnnnnnnnnnnnnnnnnnnnnnnnnnnnnnnnnnnnnnnnnnnnnnnnnnnnnnnnnnnnnnnnnnnnnnnnnnnnnnnnnnnnnnnnnnnnnnnnnnnnnnnnnnnnnnnnnnnnnnnnnnnnnnnnnnnnnnnnnnnnnnnnnnnnnnnnnnnnnnnnnnnnnnnnnnnnnnnnnnnnnnnnnnnnnnnnnnnnnnnnnnnnnnnnnnnnnnnnnnnnnnnnnnnnnnnnnnnnnnnnnnnnnnnnnnnnnnnnnnnnnnnnnnnnnnnnnnnnnnnnnnnnnnnnnnnnnnnnnnnnnnnnnnnnnnnnnnnnnnnnnnnnnnnnnnnnnnnnnnnnnnnnnnnnnnnnnnnnnnnnnnnnnnnnnnnnnnnnnnnnnnnnnnnnnnnnnnnnnnnnnnnnnnnnnnnnnnnnnnnnnnnnnnnnnnnnnnnnnnnnnnnnnnnnnnnnnnnnnnnnnnnnnnnnnnnnnnnnnnnnnnnnnnnnnnnnnnnnnnnnnnnnnnnnnnnnnnnnnnnnnnnnnnnnnnnnnnnnnnnnnnnnnnnnnnnnnnnnnnnnnnnnnnnnnnnnnnnnnnnnnnnnnnnnnnnnnnnnnnnnnnnnnnnnnnnnnnnnnnnnnnnnnnnnnnnnnnnnnnnnnnnnnnnnnnnnnnnnnnnnnnnnnnnnnnnnnnnnnnnnnnnnnnnnnnnnnnnnnnnnnnnnnnnnnnnnnnnnnnnnnnnnnnnnnnnnnnnnnnnnnnnnnnnnnnnnnnnnnnnnnnnnnnnnnnnnnnnnnnnnnnnnnnnnnnnnnnnnnnnnnnnnnnnnnnnnnnnnnnnnnnnnnnnnnnnnnnnnnnnnnnnnnnnnnnnnnnnnnnnnnnnnnnnnnnnnnnnnnnnnnnnnnnnnnnnnnnnnnnnnnnnnnnnnnnnnnnnnnnnnnnnnnnnnnnnnnnnnnnnnnnnnnnnnnnnnnnnnnnnnnnnnnnnnnnnnnnnnnnnnnnnnnnnnnnnnnnnnnnnnnnnnnnnnnnnnnnnnnnnnnnnnnnnnnnnnnnnnnnnnnnnnnnnnnnnnnnnnnnnnnnnnnnnnnnnnnnnnnnnnnnnnnnnnnnnnnnnnnnnnnnnnnnnnnnnnnnnnnnnnnnnnnnnnnnnnnnnnnnnnnnnnnnnnnnnnnnnnnnnnnnnnnnnnnnnnnnnnnnnnnnnnnnnnnnnnnnnnnnnnnnnnnnnnnnnnnnnnnnnnnnnnnnnnnnnnnnnnnnnnnnnnnnnnnnnnnnnnnnnnnnnnnnnnnnnnnnnnnnnnnnnnnnnnnnnnnnnnnnnnnnnnnnnnnnnnnnnnnnnnnnnnnnnnnnnnnnnnnnnnnnnnnnnnnnnnnnnnnnnnnnnnnnnnnnnnnnnnnnnnnnnnnnnnnnnnnnnnnnnnnnnnnnnnnnnnnnnnnnnnnnnnnnnnnnnnnnnnnnnnnnnnnnnnnnnnnnnnnnnnnnnnnnnnnnnnnnnnnnnnnnnnnnnnnnnnnnnnnnnnnnnnnnnnnnnnnnnnnnnnnnnnnnnnnnnnnnnnnnnnnnnnnnnnnnnnnnnnnnnnnnnnnnnnnnnnnnnnnnnnnnnnnnnnnnnnnnnnnnnnnnnnnnnnnnnnnnnnnnnnnnnnnnnnnnnnnnnnnnnnnnnnnnnnnnnnnnnnnnnnnnnnnnnnnnnnnnnnnnnnnnnnnnnnnnnnnnnnnnnnnnnnnnnnnnnnnnnnnnnnnnnnnnnnnnnnnnnnnnnnnnnnnnnnnnnnnnnnnnnnnnnnnnnnnnnnnnnnnnnnnnnnnnnnnnnnnnnnnnnnnnnnnnnnnnnnnnnnnnnnnnnnnnnnnnnnnnnnnnnnnnnnnnnnnnnnnnnnnnnnnnnnnnnnnnnnnnnnnnnnnnnnnnnnnnnnnnnnnnnnnnnnnnnnnnnnnnnnnnnnnnnnnnnnnnnnnnnnnnnnnnnnnnnnnnnnnnnnnnnnnnnnnnnnnnnnnnnnnnnnnnnnnnnnnnnnnnnnnnnnnnnnnnnnnnnnnnnnnnnnnnnnnnnnnnnnnnnnnnnnnnnnnnnnnnnnnnnnnnnnnnnnnnnnnnnnnnnnnnnnnnnnnnnnnnnnnnnnnnnnnnnnnnnnnnnnnnnnnnnnnnnnnnnnnnnnnnnnnnnnnnnnnnnnnnnnnnnnnnnnnnnnnnnnnnnnnnnnnnnnnnnnnnnnnnnnnnnnnnnnnnnnnnnnnnnnnnnnnnnnnnnnnnnnnnnnnnnnnnnnnnnnnnnnnnnnnnnnnnnnnnnnnnnnnnnnnnnnnnnnnnnnnnnnnnnnnnnnnnnnnnnnnnnnnnnnnnnnnnnnnnnnnnnnnnnnnnnnnnnnnnnnnnnnnnnnnnnnnnnnnnnnnnnnnnnnnnnnnnnnnnnnnnnnnnnnnnnnnnnnnnnnnnnnnnnnnnnnnnnnnnnnnnnnnnnnnnnnnnnnnnnnnnnnnnnnnnnnnnnnnnnnnnnnnnnnnnnnnnnnnnnnnnnnnnnnnnnnnnnnnnnnnnnnnnnnnnnnnnnnnnnnnnnnnnnnnnnnnnnnnnnnnnnnnnnnnnnnnnnnnnnnnnnnnnnnnnnnnnnnnnnnnnnnnnnnnnnnnnnnnnnnnnnnnnnnnnnnnnnnnnnnnnnnnnnnnnnnnnnnnnnnnnnnnnnnnnnnnnnnnnnnnnnnnnnnnnnnnnnnnnnnnnnnnnnnnnnnnnnnnnnnnnnnnnnnnnnnnnnnnnnnnnnnnnnnnnnnnnnnnnnnnnnnnnnnnnnnnnnnnnnnnnnnnnnnnnnnnnnnnnnnnnnnnnnnnnnnnnnnnnnnnnnnnnnnnnnnnnnnnnnnnnnnnnnnnnnnnnnnnnnnnnnnnnnnnnnnnnnnnnnnnnnnnnnnnnnnnnnnnnnnnnnnnnnnnnnnnnnnnnnnnnnnnnnnnnnnnnnnnnnnnnnnnnnnnnnnnnnnnnnnnnnnnnnnnnnnnnnnnnnnnnnnnnnnnnnnnnnnnnnnnnnnnnnnnnnnnnnnnnnnnnnnnnnnnnnnnnnnnnnnnnnnnnnnnnnnnnnnnnnnnnnnnnnnnnnnnnnnnnnnnnnnnnnnnnnnnnnnnnnnnnnnnnnnnnnnnnnnnnnnnnnnnnnnnnnnnnnnnnnnnnnnnnnnnnnnnnnnnnnnnnnnnnnnnnnnnnnnnnnnnnnnnnnnnnnnnnnnnnnnnnnnnnnnnnnnnnnnnnnnnnnnnnnnnnnnnnnnnnnnnnnnnnnnnnnnnnnnnnnnnnnnnnnnnnnnnnnnnnnnnnnnnnnnnnnnnnnnnnnnnnnnnnnnnnnnnnnnnnnnnnnnnnnnnnnnnnnnnnnnnnnnnnnnnnnnnnnnnnnnnnnnnnnnnnnnnnnnnnnnnnnnnnnnnnnnnnnnnnnnnnnnnnnnnnnnnnnnnnnnnnnnnnnnnnnnnnnnnnnnnnnnnnnnnnnnnnnnnnnnnnnnnnnnnnnnnnnnnnnnnnnnnnnnnnnnnnnnnnnnnnnnnnnnnnnnnnnnnnnnnnnnnnnnnnnnnnnnnnnnnnnnnnnnnnnnnnnnnnnnnnnnnnnnnnnnnnnnnnnnnnnnnnnnnnnnnnnnnnnnnnnnnnnnnnnnnnnnnnnnnnnnnnnnnnnnnnnnnnnnnnnnnnnnnnnnnnnnnnnnnnnnnnnnnnnnnnnnnnnnnnnnnnnnnnnnnnnnnnnnnnnnnnnnnnnnnnnnnnnnnnnnnnnnnnnnnnnnnnnnnnnnnnnnnnnnnnnnnnnnnnnnnnnnnnnnnnnnnnnnnnnnnnnnnnnnnnnnnnnnnnnnnnnnnnnnnnnnnnnnnnnnnnnnnnnnnnnnnnnnnnnnnnnnnnnnnnnnnnnnnnnnnnnnnnnnnnnnnnnnnnnnnnnnnnnnnnnnnnnnnnnnnnnnnnnnnnnnnnnnnnnnnnnnnnnnnnnnnnnnnnnnnnnnnnnnnnnnnnnnnnnnnnnnnnnnnnnnnnnnnnnnnnnnnnnnnnnnnnnnnnnnnnnnnnnnnnnnnnnnnnnnnnnnnnnnnnnnnnnnnnnnnnnnnnnnnnnnnnnnnnnnnnnnnnnnnnnnnnnnnnnnnnnnnnnnnnnnnnnnnnnnnnnnnnnnnnnnnnnnnnnnnnnnnnnnnnnnnnnnnnnnnnnnnnnnnnnnnnnnnnnnnnnnnnnnnnnnnnnnnnnnnnnnnnnnnnnnnnnnnnnnnnnnnnnnnnnnnnnnnnnnnnnnnnnnnnnnnnnnnnnnnnnnnnnnnnnnnnnnnnnnnnnnnnnnnnnnnnnnnnnnnnnnnnnnnnnnnnnnnnnnnnnnnnnnnnnnnnnnnnnnnnnnnnnnnnnnnnnnnnnnnnnnnnnnnnnnnnnnnnnnnnnnnnnnnnnnnnnnnnnnnnnnnnnnnnnnnnnnnnnnnnnnnnnnnnnnnnnnnnnnnnnnnnnnnnnnnnnnnnnnnnnnnnnnnnnnnnnnnnnnnnnnnnnnnnnnnnnnnnnnnnnnnnnnnnnnnnnnnnnnnnnnnnnnnnnnnnnnnnnnnnnnnnnnnnnnnnnnnnnnnnnnnnnnnnnnnnnnnnnnnnnnnnnnnnnnnnnnnnnnnnnnnnnnnnnnnnnnnnnnnnnnnnnnnnnnnnnnnnnnnnnnnnnnnnnnnnnnnnnnnnnnnnnnnnnnnnnnnnnnnnnnnnnnnnnnnnnnnnnnnnnnnnnnnnnnnnnnnnnnnnnnnnnnnnnnnnnnnnnnnnnnnnnnnnnnnnnnnnnnnnnnnnnnnnnnnnnnnnnnnnnnnnnnnnnnnnnnnnnnnnnnnnnnnnnnnnnnnnnnnnnnnnnnnnnnnnnnnnnnnnnnnnnnnnnnnnnnnnnnnnnnnnnnnnnnnnnnnnnnnnnnnnnnnnnnnnnnnnnnnnnnnnnnnnnnnnnnnnnnnnnnnnnnnnnnnnnnnnnnnnnnnnnnnnnnnnnnnnnnnnnnnnnnnnnnnnnnnnnnnnnnnnnnnnnnnnnnnnnnnnnnnnnnnnnnnnnnnnnnnnnnnnnnnnnnnnnnnnnnnnnnnnnnnnnnnnnnnnnnnnnnnnnnnnnnnnnnnnnnnnnnnnnnnnnnnnnnnnnnnnnnnnnnnnnnnnnnnnnnnnnnnnnnnnnnnnnnnnnnnnnnnnnnnnnnnnnnnnnnnnnnnnnnnnnnnnnnnnnnnnnnnnnnnnnnnnnnnnnnnnnnnnnnnnnnnnnnnnnnnnnnnnnnnnnnnnnnnnnnnnnnnnnnnnnnnnnnnnnnnnnnnnnnnnnnnnnnnnnnnnnnnnnnnnnnnnnnnnnnnnnnnnnnnnnnnnnnnnnnnnnnnnnnnnnnnnnnnnnnnnnnnnnnnnnnnnnnnnnnnnnnnnnnnnnnnnnnnnnnnnnnnnnnnnnnnnnnnnnnnnnnnnnnnnnnnnnnnnnnnnnnnnnnnnnnnnnnnnnnnnnnnnnnnnnnnnnnnnnnnnnnnnnnnnnnnnnnnnnnnnnnnnnnnnnnnnnnnnnnnnnnnnnnnnnnnnnnnnnnnnnnnnnnnnnnnnnnnnnnnnnnnnnnnnnnnnnnnnnnnnnnnnnnnnnnnnnnnnnnnnnnnnnnnnnnnnnnnnnnnnnnnnnnnnnnnnnnnnnnnnnnnnnnnnnnnnnnnnnnnnnnnnnnnnnnnnnnnnnnnnnnnnnnnnnnnnnnnnnnnnnnnnnnnnnnnnnnnnnnnnnnnnnnnnnnnnnnnnnnnnnnnnnnnnnnnnnnnnnnnnnnnnnnnnnnnnnnnnnnnnnnnnnnnnnnnnnnnnnnnnnnnnnnnnnnnnnnnnnnnnnnnnnnnnnnnnnnnnnnnnnnnnnnnnnnnnnnnnnnnnnnnnnnnnnnnnnnnnnnnnnnnnnnnnnnnnnnnnnnnnnnnnnnnnnnnnnnnnnnnnnnnnnnnnnnnnnnnnnnnnnnnnnnnnnnnnnnnnnnnnnnnnnnnnnnnnnnnnnnnnnnnnnnnnnnnnnnnnnnnnnnnnnnnnnnnnnnnnnnnnnnnnnnnnnnnnnnnnnnnnnnnnnnnnnnnnnnnnnnnnnnnnnnnnnnnnnnnnnnnnnnnnnnnnnnnnnnnnnnnnnnnnnnnnnnnnnnnnnnnnnnnnnnnnnnnnnnnnnnnnnnnnnnnnnnnnnnnnnnnnnnnnnnnnnnnnnnnnnnnnnnnnnnnnnnnnnnnnnnnnnnnnnnnnnnnnnnnnnnnnnnnnnnnnnnnnnnnnnnnnnnnnnnnnnnnnnnnnnnnnnnnnnnnnnnnnnnnnnnnnnnnnnnnnnnnnnnnnnnnnnnnnnnnnnnnnnnnnnnnnnnnnnnnnnnnnnnnnnnnnnnnnnnnnnnnnnnnnnnnnnnnnnnnnnnnnnnnnnnnnnnnnnnnnnnnnnnnnnnnnnnnnnnnnnnnnnnnnnnnnnnnnnnnnnnnnnnnnnnnnnnnnnnnnnnnnnnnnnnnnnnnnnnnnnnnnnnnnnnnnnnnnnnnnnnnnnnnnnnnnnnnnnnnnnnnnnnnnnnnnnnnnnnnnnnnnnnnnnnnnnnnnnnnnnnnnnnnnnnnnnnnnnnnnnnnnnnnnnnnnnnnnnnnnnnnnnnnnnnnnnnnnnnnnnnnnnnnnnnnnnnnnnnnnnnnnnnnnnnnnnnnnnnnnnnnnnnnnnnnnnnnnnnnnnnnnnnnnnnnnnnnnnnnnnnnnnnnnnnnnnnnnnnnnnnnnnnnnnnnnnnnnnnnnnnnnnnnnnnnnnnnnnnnnnnnnnnnnnnnnnnnnnnnnnnnnnnnnnnnnnnnnnnnnnnnnnnnnnnnnnnnnnnnnnnnnnnnnnnnnnnnnnnnnnnnnnnnnnnnnnnnnnnnnnnnnnnnnnnnnnnnnnnnnnnnnnnnnnnnnnnnnnnnnnnnnnnnnnnnnnnnnnnnnnnnnnnnnnnnnnnnnnnnnnnnnnnnnnnnnnnnnnnnnnnnnnnnnnnnnnnnnnnnnnnnnnnnnnnnnnnnnnnnnnnnnnnnnnnnnnnnnnnnnnnnnnnnnnnnnnnnnnnnnnnnnnnnnnnnnnnnnnnnnnnnnnnnnnnnnnnnnnnnnnnnnnnnnnnnnnnnnnnnnnnnnnnnnnnnnnnnnnnnnnnnnnnnnnnnnnnnnnnnnnnnnnnnnnnnnnnnnnnnnnnnnnnnnnnnnnnnnnnnnnnnnnnnnnnnnnnnnnnnnnnnnnnnnnnnnnnnnnnnnnnnnnnnnnnnnnnnnnnnnnnnnnnnnnnnnnnnnnnnnnnnnnnnnnnnnnnnnnnnnnnnnnnnnnnnnnnnnnnnnnnnnnnnnnnnnnnnnnnnnnnnnnnnnnnnnnnnnnnnnnnnnnnnnnnnnnnnnnnnnnnnnnnnnnnnnnnnnnnnnnnnnnnnnnnnnnnnnnnnnnnnnnnnnnnnnnnnnnnnnnnnnnnnnnnnnnnnnnnnnnnnnnnnnnnnnnnnnnnnnnnnnnnnnnnnnnnnnnnnnnnnnnnnnnnnnnnnnnnnnnnnnnnnnnnnnnnnnnnnnnnnnnnnnnnnnnnnnnnnnnnnnnnnnnnnnnnnnnnnnnnnnnnnnnnnnnnnnnnnnnnnnnnnnnnnnnnnnnnnnnnnnnnnnnnnnnnnnnnnnnnnnnnnnnnnnnnnnnnnnnnnnnnnnnnnnnnnnnnnnnnnnnnnnnnnnnnnnnnnnnnnnnnnnnnnnnnnnnnnnnnnnnnnnnnnnnnnnnnnnnnnnnnnnnnnnnnnnnnnnnnnnnnnnnnnnnnnnnnnnnnnnnnnnnnnnnnnnnnnnnnnnnnnnnnnnnnnnnnnnnnnnnnnnnnnnnnnnnnnnnnnnnnnnnnnnnnnnnnnnnnnnnnnnnnnnnnnnnnnnnnnnnnnnnnnnnnnnnnnnnnnnnnnnnnnnnnnnnnnnnnnnnnnnnnnnnnnnnnnnnnnnnnnnnnnnnnnnnnnnnnnnnnnnnnnnnnnnnnnnnnnnnnnnnnnnnnnnnnnnnnnnnnnnnnnnnnnnnnnnnnnnnnnnnnnnnnnnnnnnnnnnnnnnnnnnnnnnnnnnnnnnnnnnnnnnnnnnnnnnnnnnnnnnnnnnnnnnnnnnnnnnnnnnnnnnnnnnnnnnnnnnnnnnnnnnnnnnnnnnnnnnnnnnnnnnnnnnnnnnnnnnnnnnnnnnnnnnnnnnnnnnnnnnnnnnnnnnnnnnnnnnnnnnnnnnnnnnnnnnnnnnnnnnnnnnnnnnnnnnnnnnnnnnnnnnnnnnnnnnnnnnnnnnnnnnnnnnnnnnnnnnnnnnnnnnnnnnnnnnnnnnnnnnnnnnnnnnnnnnnnnnnnnnnnnnnnnnnnnnnnnnnnnnnnnnnnnnnnnnnnnnnnnnnnnnnnnnnnnnnnnnnnnnnnnnnnnnnnnnnnnnnnnnnnnnnnnnnnnnnnnnnnnnnnnnnnnnnnnnnnnnnnnnnnnnnnnnnnnnnnnnnnnnnnnnnnnnnnnnnnnnnnnnnnnnnnnnnnnnnnnnnnnnnnnnnnnnnnnnnnnnnnnnnnnnnnnnnnnnnnnnnnnnnnnnnnnnnnnnnnnnnnnnnnnnnnnnnnnnnnnnnnnnnnnnnnnnnnnnnnnnnnnnnnnnnnnnnnnnnnnnnnnnnnnnnnnnnnnnnnnnnnnnnnnnnnnnnnnnnnnnnnnnnnnnnnnnnnnnnnnnnnnnnnnnnnnnnnnnnnnnnnnnnnnnnnnnnnnnnnnnnnnnnnnnnnnnnnnnnnnnnnnnnnnnnnnnnnnnnnnnnnnnnnnnnnnnnnnnnnnnnnnnnnnnnnnnnnnnnnnnnnnnnnnnnnnnnnnnnnnnnnnnnnnnnnnnnnnnnnnnnnnnnnnnnnnnnnnnnnnnnnnnnnnnnnnnnnnnnnnnnnnnnnnnnnnnnnnnnnnnnnnnnnnnnnnnnnnnnnnnnnnnnnnnnnnnnnnnnnnnnnnnnnnnnnnnnnnnnnnnnnnnnnnnnnnnnnnnnnnnnnnnnnnnnnnnnnnnnnnnnnnnnnnnnnnnnnnnnnnnnnnnnnnnnnnnnnnnnnnnnnnnnnnnnnnnnnnnnnnnnnnnnnnnnnnnnnnnnnnnnnnnnnnnnnnnnnnnnnnnnnnnnnnnnnnnnnnnnnnnnnnnnnnnnnnnnnnnnnnnnnnnnnnnnnnnnnnnnnnnnnnnnnnnnnnnnnnnnnnnnnnnnnnnnnnnnnnnnnnnnnnnnnnnnnnnnnnnnnnnnnnnnnnnnnnnnnnnnnnnnnnnnnnnnnnnnnnnnnnnnnnnnnnnnnnnnnnnnnnnnnnnnnnnnnnnnnnnnnnnnnnnnnnnnnnnnnnnnnnnnnnnnnnnnnnnnnnnnnnnnnnnnnnnnnnnnnnnnnnnnnnnnnnnnnnnnnnnnnnnnnnnnnnnnnnnnnnnnnnnnnnnnnnnnnnnnnnnnnnnnnnnnnnnnnnnnnnnnnnnnnnnnnnnnnnnnnnnnnnnnnnnnnnnnnnnnnnnnnnnnnnnnnnnnnnnnnnnnnnnnnnnnnnnnnnnnnnnnnnnnnnnnnnnnnnnnnnnnnnnnnnnnnnnnnnnnnnnnnnnnnnnnnnnnnnnnnnnnnnnnnnnnnnnnnnnnnnnnnnnnnnnnnnnnnnnnnnnnnnnnnnnnnnnnnnnnnnnnnnnnnnnnnnnnnnnnnnnnnnnnnnnnnnnnnnnnnnnnnnnnnnnnnnnnnnnnnnnnnnnnnnnnnnnnnnnnnnnnnnnnnnnnnnnnnnnnnnnnnnnnnnnnnnnnnnnnnnnnnnnnnnnnnnnnnnnnnnnnnnnnnnnnnnnnnnnnnnnnnnnnnnnnnnnnnnnnnnnnnnnnnnnnnnnnnnnnnnnnnnnnnnnnnnnnnnnnnnnnnnnnnnnnnnnnnnnnnnnnnnnnnnnnnnnnnnnnnnnnnnnnnnnnnnnnnnnnnnnnnnnnnnnnnnnnnnnnnnnnnnnnnnnnnnnnnnnnnnnnnnnnnnnnnnnnnnnnnnnnnnnnnnnnnnnnnnnnnnnnnnnnnnnnnnnnnnnnnnnnnnnnnnnnnnnnnnnnnnnnnnnnnnnnnnnnnnnnnnnnnnnnnnnnnnnnnnnnnnnnnnnnnnnnnnnnnnnnnnnnnnnnnnnnnnnnnnnnnnnnnnnnnnnnnnnnnnnnnnnnnnnnnnnnnnnnnnnnnnnnnnnnnnnnnnnnnnnnnnnnnnnnnnnnnnnnnnnnnnnnnnnnnnnnnnnnnnnnnnnnnnnnnnnnnnnnnnnnnnnnnnnnnnnnnnnnnnnnnnnnnnnnnnnnnnnnnnnnnnnnnnnnnnnnnnnnnnnnnnnnnnnnnnnnnnnnnnnnnnnnnnnnnnnnnnnnnnnnnnnnnnnnnnnnnnnnnnnnnnnnnnnnnnnnnnnnnnnnnnnnnnnnnnnnnnnnnnnnnnnnnnnnnnnnnnnnnnnnnnnnnnnnnnnnnnnnnnnnnnnnnnnnnnnnnnnnnnnnnnnnnnnnnnnnnnnnnnnnnnnnnnnnnnnnnnnnnnnnnnnnnnnnnnnnnnnnnnnnnnnnnnnnnnnnnnnnnnnnnnnnnnnnnnnnnnnnnnnnnnnnnnnnnnnnnnnnnnnnnnnnnnnnnnnnnnnnnnnnnnnnnnnnnnnnnnnnnnnnnnnnnnnnnnnnnnnnnnnnnnnnnnnnnnnnnnnnnnnnnnnnnnnnnnnnnnnnnnnnnnnnnnnnnnnnnnnnnnnnnnnnnnnnnnnnnnnnnnnnnnnnnnnnnnnnnnnnnnnnnnnnnnnnnnnnnnnnnnnnnnnnnnnnnnnnnnnnnnnnnnnnnnnnnnnnnnnnnnnnnnnnnnnnnnnnnnnnnnnnnnnnnnnnnnnnnnnnnnnnnnnnnnnnnnnnnnnnnnnnnnnnnnnnnnnnnnnnnnnnnnnnnnnnnnnnnnnnnnnnnnnnnnnnnnnnnnnnnnnnnnnnnnnnnnnnnnnnnnnnnnnnnnnnnnnnnnnnnnnnnnnnnnnnnnnnnnnnnnnnnnnnnnnnnnnnnnnnnnnnnnnnnnnnnnnnnnnnnnnnnnnnnnnnnnnnnnnnnnnnnnnnnnnnnnnnnnnnnnnnnnnnnnnnnnnnnnnnnnnnnnnnnnnnnnnnnnnnnnnnnnnnnnnnnnnnnnnnnnnnnnnnnnnnnnnnnnnnnnnnnnnnnnnnnnnnnnnnnnnnnnnnnnnnnnnnnnnnnnnnnnnnnnnnnnnnnnnnnnnnnnnnnnnnnnnnnnnnnnnnnnnnnnnnnnnnnnnnnnnnnnnnnnnnnnnnnnnnnnnnnnnnnnnnnnnnnnnnnnnnnnnnnnnnnnnnnnnnnnnnnnnnnnnnnnnnnnnnnnnnnnnnnnnnnnnnnnnnnnnnnnnnnnnnnnnnnnnnnnnnnnnnnnnnnnnnnnnnnnnnnnnnnnnnnnnnnnnnnnnnnnnnnnnnnnnnnnnnnnnnnnnnnnnnnnnnnnnnnnnnnnnnnnnnnnnnnnnnnnnnnnnnnnnnnnnnnnnnnnnnnnnnnnnnnnnnnnnnnnnnnnnnnnnnnnnnnnnnnnnnnnnnnnnnnnnnnnnnnnnnnnnnnnnnnnnnnnnnnnnnnnnnnnnnnnnnnnnnnnnnnnnnnnnnnnnnnnnnnnnnnnnnnnnnnnnnnnnnnnnnnnnnnnnnnnnnnnnnnnnnnnnnnnnnnnnnnnnnnnnnnnnnnnnnnnnnnnnnnnnnnnnnnnnnnnnnnnnnnnnnnnnnnnnnnnnnnnnnnnnnnnnnnnnnnnnnnnnnnnnnnnnnnnnnnnnnnnnnnnnnnnnnnnnnnnnnnnnnnnnnnnnnnnnnnnnnnnnnnnnnnnnnnnnnnnnnnnnnnnnnnnnnnnnnnnnnnnnnnnnnnnnnnnnnnnnnnnnnnnnnnnnnnnnnnnnnnnnnnnnnnnnnnnnnnnnnnnnnnnnnnnnnnnnnnnnnnnnnnnnnnnnnnnnnnnnnnnnnnnnnnnnnnnnnnnnnnnnnnnnnnnnnnnnnnnnnnnnnnnnnnnnnnnnnnnnnnnnnnnnnnnnnnnnnnnnnnnnnnnnnnnnnnnnnnnnnnnnnnnnnnnnnnnnnnnnnnnnnnnnnnnnnnnnnnnnnnnnnnnnnnnnnnnnnnnnnnnnnnnnnnnnnnnnnnnnnnnnnnnnnnnnnnnnnnnnnnnnnnnnnnnnnnnnnnnnnnnnnnnnnnnnnnnnnnnnnnnnnnnnnnnnnnnnnnnnnnnnnnnnnnnnnnnnnnnnnnnnnnnnnnnnnnnnnnnnnnnnnnnnnnnnnnnnnnnnnnnnnnnnnnnnnnnnnnnnnnnnnnnnnnnnnnnnnnnnnnnnnnnnnnnnnnnnnnnnnnnnnnnnnnnnnnnnnnnnnnnnnnnnnnnnnnnnnnnnnnnnnnnnnnnnnnnnnnnnnnnnnnnnnnnnnnnnnnnnnnnnnnnnnnnnnnnnnnnnnnnnnnnnnnnnnnnnnnnnnnnnnnnnnnnnnnnnnnnnnnnnnnnnnnnnnnnnnnnnnnnnnnnnnnnnnnnnnnnnnnnnnnnnnnnnnnnnnnnnnnnnnnnnnnnnnnnnnnnnnnnnnnnnnnnnnnnnnnnnnnnnnnnnnnnnnnnnnnnnnnnnnnnnnnnnnnnnnnnnnnnnnnnnnnnnnnnnnnnnnnnnnnnnnnnnnnnnnnnnnnnnnnnnnnnnnnnnnnnnnnnnnnnnnnnnnnnnnnnnnnnnnnnnnnnnnnnnnnnnnnnnnnnnnnnnnnnnnnnnnnnnnnnnnnnnnnnnnnnnnnnnnnnnnnnnnnnnnnnnnnnnnnnnnnnnnnnnnnnnnnnnnnnnnnnnnnnnnnnnnnnnnnnnnnnnnnnnnnnnnnnnnnnnnnnnnnnnnnnnnnnnnnnnnnnnnnnnnnnnnnnnnnnnnnnnnnnnnnnnnnnnnnnnnnnnnnnnnnnnnnnnnnnnnnnnnnnnnnnnnnnnnnnnnnnnnnnnnnnnnnnnnnnnnnnnnnnnnnnnnnnnnnnnnnnnnnnnnnnnnnnnnnnnnnnnnnnnnnnnnnnnnnnnnnnnnnnnnnnnnnnnnnnnnnnnnnnnnnnnnnnnnnnnnnnnnnnnnnnnnnnnnnnnnnnnnnnnnnnnnnnnnnnnnnnnnnnnnnnnnnnnnnnnnnnnnnnnnnnnnnnnnnnnnnnnnnnnnnnnnnnnnnnnnnnnnnnnnnnnnnnnnnnnnnnnnnnnnnnnnnnnnnnnnnnnnnnnnnnnnnnnnnnnnnnnnnnnnnnnnnnnnnnnnnnnnnnnnnnnnnnnnnnnnnnnnnnnnnnnnnnnnnnnnnnnnnnnnnnnnnnnnnnnnnnnnnnnnnnnnnnnnnnnnnnnnnnnnnnnnnnnnnnnnnnnnnnnnnnnnnnnnnnnnnnnnnnnnnnnnnnnnnnnnnnnnnnnnnnnnnnnnnnnnnnnnnnnnnnnnnnnnnnnnnnnnnnnnnnnnnnnnnnnnnnnnnnnnnnnnnnnnnnnnnnnnnnnnnnnnnnnnnnnnnnnnnnnnnnnnnnnnnnnnnnnnnnnnnnnnnnnnnnnnnnnnnnnnnnnnnnnnnnnnnnnnnnnnnnnnnnnnnnnnnnnnnnnnnnnnnnnnnnnnnnnnnnnnnnnnnnnnnnnnnnnnnnnnnnnnnnnnnnnnnnnnnnnnnnnnnnnnnnnnnnnnnnnnnnnnnnnnnnnnnnnnnnnnnnnnnnnnnnnnnnnnnnnnnnnnnnnnnnnnnnnnnnnnnnnnnnnnnnnnnnnnnnnnnnnnnnnnnnnnnnnnnnnnnnnnnnnnnnnnnnnnnnnnnnnnnnnnnnnnnnnnnnnnnnnnnnnnnnnnnnnnnnnnnnnnnnnnnnnnnnnnnnnnnnnnnnnnnnnnnnnnnnnnnnnnnnnnnnnnnnnnnnnnnnnnnnnnnnnnnnnnnnnnnnnnnnnnnnnnnnnnnnnnnnnnnnnnnnnnnnnnnnnnnnnnnnnnnnnnnnnnnnnnnnnnnnnnnnnnnnnnnnnnnnnnnnnnnnnnnnnnnnnnnnnnnnnnnnnnnnnnnnnnnnnnnnnnnnnnnnnnnnnnnnnnnnnnnnnnnnnnnnnnnnnnnnnnnnnnnnnnnnnnnnnnnnnnnnnnnnnnnnnnnnnnnnnnnnnnnnnnnnnnnnnnnnnnnnnnnnnnnnnnnnnnnnnnnnnnnnnnnnnnnnnnnnnnnnnnnnnnnnnnnnnnnnnnnnnnnnnnnnnnnnnnnnnnnnnnnnnnnnnnnnnnnnnnnnnnnnnnnnnnnnnnnnnnnnnnnnnnnnnnnnnnnnnnnnnnnnnnnnnnnnnnnnnnnnnnnnnnnnnnnnnnnnnnnnnnnnnnnnnnnnnnnnnnnnnnnnnnnnnnnnnnnnnnnnnnnnnnnnnnnnnnnnnnnnnnnnnnnnnnnnnnnnnnnnnnnnnnnnnnnnnnnnnnnnnnnnnnnnnnnnnnnnnnnnnnnnnnnnnnnnnnnnnnnnnnnnnnnnnnnnnnnnnnnnnnnnnnnnnnnnnnnnnnnnnnnnnnnnnnnnnnnnnnnnnnnnnnnnnnnnnnnnnnnnnnnnnnnnnnnnnnnnnnnnnnnnnnnnnnnnnnnnnnnnnnnnnnnnnnnnnnnnnnnnnnnnnnnnnnnnnnnnnnnnnnnnnnnnnnnnnnnnnnnnnnnnnnnnnnnnnnnnnnnnnnnnnnnnnnnnnnnnnnnnnnnnnnnnnnnnnnnnnnnnnnnnnnnnnnnnnnnnnnnnnnnnnnnnnnnnnnnnnnnnnnnnnnnnnnnnnnnnnnnnnnnnnnnnnnnnnnnnnnnnnnnnnnnnnnnnnnnnnnnnnnnnnnnnnnnnnnnnnnnnnnnnnnnnnnnnnnnnnnnnnnnnnnnnnnnnnnnnnnnnnnnnnnnnnnnnnnnnnnnnnnnnnnnnnnnnnnnnnnnnnnnnnnnnnnnnnnnnnnnnnnnnnnnnnnnnnnnnnnnnnnnnnnnnnnnnnnnnnnnnnnnnnnnnnnnnnnnnnnnnnnnnnnnnnnnnnnnnnnnnnnnnnnnnnnnnnnnnnnnnnnnnnnnnnnnnnnnnnnnnnnnnnnnnnnnnnnnnnnnnnnnnnnnnnnnnnnnnnnnnnnnnnnnnnnnnnnnnnnnnnnnnnnnnnnnnnnnnnnnnnnnnnnnnnnnnnnnnnnnnnnnnnnnnnnnnnnnnnnnnnnnnnnnnnnnnnnnnnnnnnnnnnnnnnnnnnnnnnnnnnnnnnnnnnnnnnnnnnnnnnnnnnnnnnnnnnnnnnnnnnnnnnnnnnnnnnnnnnnnnnnnnnnnnnnnnnnnnnnnnnnnnnnnnnnnnnnnnnnnnnnnnnnnnnnnnnnnnnnnnnnnnnnnnnnnnnnnnnnnnnnnnnnnnnnnnnnnnnnnnnnnnnnnnnnnnnnnnnnnnnnnnnnnnnnnnnnnnnnnnnnnnnnnnnnnnnnnnnnnnnnnnnnnnnnnnnnnnnnnnnnnnnnnnnnnnnnnnnnnnnnnnnnnnnnnnnnnnnnnnnnnnnnnnnnnnnnnnnnnnnnnnnnnnnnnnnnnnnnnnnnnnnnnnnnnnnnnnnnnnnnnnnnnnnnnnnnnnnnnnnnnnnnnnnnnnnnnnnnnnnnnnnnnnnnnnnnnnnnnnnnnnnnnnnnnnnnnnnnnnnnnnnnnnnnnnnnnnnnnnnnnnnnnnnnnnnnnnnnnnnnnnnnnnnnnnnnnnnnnnnnnnnnnnnnnnnnnnnnnnnnnnnnnnnnnnnnnnnnnnnnnnnnnnnnnnnnnnnnnnnnnnnnnnnnnnnnnnnnnnnnnnnnnnnnnnnnnnnnnnnnnnnnnnnnnnnnnnnnnnnnnnnnnnnnnnnnnnnnnnnnnnnnnnnnnnnnnnnnnnnnnnnnnnnnnnnnnnnnnnnnnnnnnnnnnnnnnnnnnnnnnnnnnnnnnnnnnnnnnnnnnnnnnnnnnnnnnnnnnnnnnnnnnnnnnnnnnnnnnnnnnnnnnnnnnnnnnnnnnnnnnnnnnnnnnnnnnnnnnnnnnnnnnnnnnnnnnnnnnnnnnnnnnnnnnnnnnnnnnnnnnnnnnnnnnnnnnnnnnnnnnnnnnnnnnnnnnnnnnnnnnnnnnnnnnnnnnnnnnnnnnnnnnnnnnnnnnnnnnnnnnnnnnnnnnnnnnnnnnnnnnnnnnnnnnnnnnnnnnnnnnnnnnnnnnnnnnnnnnnnnnnnnnnnnnnnnnnnnnnnnnnnnnnnnnnnnnnnnnnnnnnnnnnnnnnnnnnnnnnnnnnnnnnnnnnnnnnnnnnnnnnnnnnnnnnnnnnnnnnnnnnnnnnnnnnnnnnnnnnnnnnnnnnnnnnnnnnnnnnnnnnnnnnnnnnnnnnnnnnnnnnnnnnnnnnnnnnnnnnnnnnnnnnnnnnnnnnnnnnnnnnnnnnnnnnnnnnnnnnnnnnnnnnnnnnnnnnnnnnnnnnnnnnnnnnnnnnnnnnnnnnnnnnnnnnnnnnnnnnnnnnnnnnnnnnnnnnnnnnnnnnnnnnnnnnnnnnnnnnnnnnnnnnnnnnnnnnnnnnnnnnnnnnnnnnnnnnnnnnnnnnnnnnnnnnnnnnnnnnnnnnnnnnnnnnnnnnnnnnnnnnnnnnnnnnnnnnnnnnnnnnnnnnnnnnnnnnnnnnnnnnnnnnnnnnnnnnnnnnnnnnnnnnnnnnnnnnnnnnnnnnnnnnnnnnnnnnnnnnnnnnnnnnnnnnnnnnnnnnnnnnnnnnnnnnnnnnnnnnnnnnnnnnnnnnnnnnnnnnnnnnnnnnnnnnnnnnnnnnnnnnnnnnnnnnnnnnnnnnnnnnnnnnnnnnnnnnnnnnnnnnnnnnnnnnnnnnnnnnnnnnnnnnnnnnnnnnnnnnnnnnnnnnnnnnnnnnnnnnnnnnnnnnnnnnnnnnnnnnnnnnnnnnnnnnnnnnnnnnnnnnnnnnnnnnnnnnnnnnnnnnnnnnnnnnnnnnnnnnnnnnnnnnnnnnnnnnnnnnnnnnnnnnnnnnnnnnnnnnnnnnnnnnnnnnnnnnnnnnnnnnnnnnnnnnnnnnnnnnnnnnnnnnnnnnnnnnnnnnnnnnnnnnnnnnnnnnnnnnnnnnnnnnnnnnnnnnnnnnnnnnnnnnnnnnnnnnnnnnnnnnnnnnnnnnnnnnnnnnnnnnnnnnnnnnnnnnnnnnnnnnnnnnnnnnnnnnnnnnnnnnnnnnnnnnnnnnnnnnnnnnnnnnnnnnnnnnnnnnnnnnnnnnnnnnnnnnnnnnnnnnnnnnnnnnnnnnnnnnnnnnnnnnnnnnnnnnnnnnnnnnnnnnnnnnnnnnnnnnnnnnnnnnnnnnnnnnnnnnnnnnnnnnnnnnnnnnnnnnnnnnnnnnnnnnnnnnnnnnnnnnnnnnnnnnnnnnnnnnnnnnnnnnnnnnnnnnnnnnnnnnnnnnnnnnnnnnnnnnnnnnnnnnnnnnnnnnnnnnnnnnnnnnnnnnnnnnnnnnnnnnnnnnnnnnnnnnnnnnnnnnnnnnnnnnnnnnnnnnnnnnnnnnnnnnnnnnnnnnnnnnnnnnnnnnnnnnnnnnnnnnnnnnnnnnnnnnnnnnnnnnnnnnnnnnnnnnnnnnnnnnnnnnnnnnnnnnnnnnnnnnnnnnnnnnnnnnnnnnnnnnnnnnnnnnnnnnnnnnnnnnnnnnnnnnnnnnnnnnnnnnnnnnnnnnnnnnnnnnnnnnnnnnnnnnnnnnnnnnnnnnnnnnnnnnnnnnnnnnnnnnnnnnnnnnnnnnnnnnnnnnnnnnnnnnnnnnnnnnnnnnnnnnnnnnnnnnnnnnnnnnnnnnnnnnnnnnnnnnnnnnnnnnnnnnnnnnnnnnnnnnnnnnnnnnnnnnnnnnnnnnnnnnnnnnnnnnnnnnnnnnnnnnnnnnnnnnnnnnnnnnnnnnnnnnnnnnnnnnnnnnnnnnnnnnnnnnnnnnnnnnnnnnnnnnnnnnnnnnnnnnnnnnnnnnnnnnnnnnnnnnnnnnnnnnnnnnnnnnnnnnnnnnnnnnnnnnnnnnnnnnnnnnnnnnnnnnnnnnnnnnnnnnnnnnnnnnnnnnnnnnnnnnnnnnnnnnnnnnnnnnnnnnnnnnnnnnnnnnnnnnnnnnnnnnnnnnnnnnnnnnnnnnnnnnnnnnnnnnnnnnnnnnnnnnnnnnnnnnnnnnnnnnnnnnnnnnnnnnnnnnnnnnnnnnnnnnnnnnnnnnnnnnnnnnnnnnnnnnnnnnnnnnnnnnnnnnnnnnnnnnnnnnnnnnnnnnnnnnnnnnnnnnnnnnnnnnnnnnnnnnnnnnnnnnnnnnnnnnnnnnnnnnnnnnnnnnnnnnnnnnnnnnnnnnnnnnnnnnnnnnnnnnnnnnnnnnnnnnnnnnnnnnnnnnnnnnnnnnnnnnnnnnnnnnnnnnnnnnnnnnnnnnnnnnnnnnnnnnnnnnnnnnnnnnnnnnnnnnnnnnnnnnnnnnnnnnnnnnnnnnnnnnnnnnnnnnnnnnnnnnnnnnnnnnnnnnnnnnnnnnnnnnnnnnnnnnnnnnnnnnnnnnnnnnnnnnnnnnnnnnnnnnnnnnnnnnnnnnnnnnnnnnnnnnnnnnnnnnnnnnnnnnnnnnnnnnnnnnnnnnnnnnnnnnnnnnnnnnnnnnnnnnnnnnnnnnnnnnnnnnnnnnnnnnnnnnnnnnnnnnnnnnnnnnnnnnnnnnnnnnnnnnnnnnnnnnnnnnnnnnnnnnnnnnnnnnnnnnnnnnnnnnnnnnnnnnnnnnnnnnnnnnnnnnnnnnnnnnnnnnnnnnnnnnnnnnnnnnnnnnnnnnnnnnnnnnnnnnnnnnnnnnnnnnnnnnnnnnnnnnnnnnnnnnnnnnnnnnnnnnnnnnnnnnnnnnnnnnnnnnnnnnnnnnnnnnnnnnnnnnnnnnnnnnnnnnnnnnnnnnnnnnnnnnnnnnnnnnnnnnnnnnnnnnnnnnnnnnnnnnnnnnnnnnnnnnnnnnnnnnnnnnnnnnnnnnnnnnnnnnnnnnnnnnnnnnnnnnnnnnnnnnnnnnnnnnnnnnnnnnnnnnnnnnnnnnnnnnnnnnnnnnnnnnnnnnnnnnnnnnnnnnnnnnnnnnnnnnnnnnnnnnnnnnnnnnnnnnnnnnnnnnnnnnnnnnnnnnnnnnnnnnnnnnnnnnnnnnnnnnnnnnnnnnnnnnnnnnnnnnnnnnnnnnnnnnnnnnnnnnnnnnnnnnnnnnnnnnnnnnnnnnnnnnnnnnnnnnnnnnnnnnnnnnnnnnnnnnnnnnnnnnnnnnnnnnnnnnnnnnnnnnnnnnnnnnnnnnnnnnnnnnnnnnnnnnnnnnnnnnnnnnnnnnnnnnnnnnnnnnnnnnnnnnnnnnnnnnnnnnnnnnnnnnnnnnnnnnnnnnnnnnnnnnnnnnnnnnnnnnnnnnnnnnnnnnnnnnnnnnnnnnnnnnnnnnnnnnnnnnnnnnnnnnnnnnnnnnnnnnnnnnnnnnnnnnnnnnnnnnnnnnnnnnnnnnnnnnnnnnnnnnnnnnnnnnnnnnnnnnnnnnnnnnnnnnnnnnnnnnnnnnnnnnnnnnnnnnnnnnnnnnnnnnnnnnnnnnnnnnnnnnnnnnnnnnnnnnnnnnnnnnnnnnnnnnnnnnnnnnnnnnnnnnnnnnnnnnnnnnnnnnnnnnnnnnnnnnnnnnnnnnnnnnnnnnnnnnnnnnnnnnnnnnnnnnnnnnnnnnnnnnnnnnnnnnnnnnnnnnnnnnnnnnnnnnnnnnnnnnnnnnnnnnnnnnnnnnnnnnnnnnnnnnnnnnnnnnnnnnnnnnnnnnnnnnnnnnnnnnnnnnnnnnnnnnnnnnnnnnnnnnnnnnnnnnnnnnnnnnnnnnnnnnnnnnnnnnnnnnnnnnnnnnnnnnnnnnnnnnnnnnnnnnnnnnnnnnnnnnnnnnnnnnnnnnnnnnnnnnnnnnnnnnnnnnnnnnnnnnnnnnnnnnnnnnnnnnnnnnnnnnnnnnnnnnnnnnnnnnnnnnnnnnnnnnnnnnnnnnnnnnnnnnnnnnnnnnnnnnnnnnnnnnnnnnnnnnnnnnnnnnnnnnnnnnnnnnnnnnnnnnnnnnnnnnnnnnnnnnnnnnnnnnnnnnnnnnnnnnnnnnnnnnnnnnnnnnnnnnnnnnnnnnnnnnnnnnnnnnnnnnnnnnnnnnnnnnnnnnnnnnnnnnnnnnnnnnnnnnnnnnnnnnnnnnnnnnnnnnnnnnnnnnnnnnnnnnnnnnnnnnnnnnnnnnnnnnnnnnnnnnnnnnnnnnnnnnnnnnnnnnnnnnnnnnnnnnnnnnnnnnnnnnnnnnnnnnnnnnnnnnnnnnnnnnnnnnnnnnnnnnnnnnnnnnnnnnnnnnnnnnnnnnnnnnnnnnnnnnnnnnnnnnnnnnnnnnnnnnnnnnnnnnnnnnnnnnnnnnnnnnnnnnnnnnnnnnnnnnnnnnnnnnnnnnnnnnnnnnnnnnnnnnnnnnnnnnnnnnnnnnnnnnnnnnnnnnnnnnnnnnnnnnnnnnnnnnnnnnnnnnnnnnnnnnnnnnnnnnnnnnnnnnnnnnnnnnnnnnnnnnnnnnnnnnnnnnnnnnnnnnnnnnnnnnnnnnnnnnnnnnnnnnnnnnnnnnnnnnnnnnnnnnnnnnnnnnnnnnnnnnnnnnnnnnnnnnnnnnnnnnnnnnnnnnnnnnnnnnnnnnnnnnnnnnnnnnnnnnnnnnnnnnnnnnnnnnnnnnnnnnnnnnnnnnnnnnnnnnnnnnnnnnnnnnnnnnnnnnnnnnnnnnnnnnnnnnnnnnnnnnnnnnnnnnnnnnnnnnnnnnnnnnnnnnnnnnnnnnnnnnnnnnnnnnnnnnnnnnnnnnnnnnnnnnnnnnnnnnnnnnnnnnnnnnnnnnnnnnnnnnnnnnnnnnnnnnnnnnnnnnnnnnnnnnnnnnnnnnnnnnnnnnnnnnnnnnnnnnnnnnnnnnnnnnnnnnnnnnnnnnnnnnnnnnnnnnnnnnnnnnnnnnnnnnnnnnnnnnnnnnnnnnnnnnnnnnnnnnnnnnnnnnnnnnnnnnnnnnnnnnnnnnnnnnnnnnnnnnnnnnnnnnnnnnnnnnnnnnnnnnnnnnnnnnnnnnnnnnnnnnnnnnnnnnnnnnnnnnnnnnnnnnnnnnnnnnnnnnnnnnnnnnnnnnnnnnnnnnnnnnnnnnnnnnnnnnnnnnnnnnnnnnnnnnnnnnnnnnnnnnnnnnnnnnnnnnnnnnnnnnnnnnnnnnnnnnnnnnnnnnnnnnnnnnnnnnnnnnnnnnnnnnnnnnnnnnnnnnnnnnnnnnnnnnnnnnnnnnnnnnnnnnnnnnnnnnnnnnnnnnnnnnnnnnnnnnnnnnnnnnnnnnnnnnnnnnnnnnnnnnnnnnnnnnnnnnnnnnnnnnnnnnnnnnnnnnnnnnnnnnnnnnnnnnnnnnnnnnnnnnnnnnnnnnnnnnnnnnnnnnnnnnnnnnnnnnnnnnnnnnnnnnnnnnnnnnnnnnnnnnnnnnnnnnnnnnnnnnnnnnnnnnnnnnnnnnnnnnnnnnnnnnnnnnnnnnnnnnnnnnnnnnnnnnnnnnnnnnnnnnnnnnnnnnnnnnnnnnnnnnnnnnnnnnnnnnnnnnnnnnnnnnnnnnnnnnnnnnnnnnnnnnnnnnnnnnnnnnnnnnnnnnnnnnnnnnnnnnnnnnnnnnnnnnnnnnnnnnnnnnnnnnnnnnnnnnnnnnnnnnnnnnnnnnnnnnnnnnnnnnnnnnnnnnnnnnnnnnnnnnnnnnnnnnnnnnnnnnnnnnnnnnnnnnnnnnnnnnnnnnnnnnnnnnnnnnnnnnnnnnnnnnnnnnnnnnnnnnnnnnnnnnnnnnnnnnnnnnnnnnnnnnnnnnnnnnnnnnnnnnnnnnnnnnnnnnnnnnnnnnnnnnnnnnnnnnnnnnnnnnnnnnnnnnnnnnnnnnnnnnnnnnnnnnnnnnnnnnnnnnnnnnnnnnnnnnnnnnnnnnnnnnnnnnnnnnnnnnnnnnnnnnnnnnnnnnnnnnnnnnnnnnnnnnnnnnnnnnnnnnnnnnnnnnnnnnnnnnnnnnnnnnnnnnnnnnnnnnnnnnnnnnnnnnnnnnnnnnnnnnnnnnnnnnnnnnnnnnnnnnnnnnnnnnnnnnnnnnnnnnnnnnnnnnnnnnnnnnnnnnnnnnnnnnnnnnnnnnnnnnnnnnnnnnnnnnnnnnnnnnnnnnnnnnnnnnnnnnnnnnnnnnnnnnnnnnnnnnnnnnnnnnnnnnnnnnnnnnnnnnnnnnnnnnnnnnnnnnnnnnnnnnnnnnnnnnnnnnnnnnnnnnnnnnnnnnnnnnnnnnnnnnnnnnnnnnnnnnnnnnnnnnnnnnnnnnnnnnnnnnnnnnnnnnnnnnnnnnnnnnnnnnnnnnnnnnnnnnnnnnnnnnnnnnnnnnnnnnnnnnnnnnnnnnnnnnnnnnnnnnnnnnnnnnnnnnnnnnnnnnnnnnnnnnnnnnnnnnnnnnnnnnnnnnnnnnnnnnnnnnnnnnnnnnnnnnnnnnnnnnnnnnnnnnnnnnnnnnnnnnnnnnnnnnnnnnnnnnnnnnnnnnnnnnnnnnnnnnnnnnnnnnnnnnnnnnnnnnnnnnnnnnnnnnnnnnnnnnnnnnnnnnnnnnnnnnnnnnnnnnnnnnnnnnnnnnnnnnnnnnnnnnnnnnnnnnnnnnnnnnnnnnnnnnnnnnnnnnnnnnnnnnnnnnnnnnnnnnnnnnnnnnnnnnnnnnnnnnnnnnnnnnnnnnnnnnnnnnnnnnnnnnnnnnnnnnnnnnnnnnnnnnnnnnnnnnnnnnnnnnnnnnnnnnnnnnnnnnnnnnnnnnnnnnnnnnnnnnnnnnnnnnnnnnnnnnnnnnnnnnnnnnnnnnnnnnnnnnnnnnnnnnnnnnnnnnnnnnnnnnnnnnnnnnnnnnnnnnnnnnnnnnnnnnnnnnnnnnnnnnnnnnnnnnnnnnnnnnnnnnnnnnnnnnnnnnnnnnnnnnnnnnnnnnnnnnnnnnnnnnnnnnnnnnnnnnnnnnnnnnnnnnnnnnnnnnnnnnnnnnnnnnnnnnnnnnnnnnnnnnnnnnnnnnnnnnnnnnnnnnnnnnnnnnnnnnnnnnnnnnnnnnnnnnnnnnnnnnnnnnnnnnnnnnnnnnnnnnnnnnnnnnnnnnnnnnnnnnnnnnnnnnnnnnnnnnnnnnnnnnnnnnnnnnnnnnnnnnnnnnnnnnnnnnnnnnnnnnnnnnnnnnnnnnnnnnnnnnnnnnnnnnnnnnnnnnnnnnnnnnnnnnnnnnnnnnnnnnnnnnnnnnnnnnnnnnnnnnnnnnnnnnnnnnnnnnnnnnnnnnnnnnnnnnnnnnnnnnnnnnnnnnnnnnnnnnnnnnnnnnnnnnnnnnnnnnnnnnnnnnnnnnnnnnnnnnnnnnnnnnnnnnnnnnnnnnnnnnnnnnnnnnnnnnnnnnnnnnnnnnnnnnnnnnnnnnnnnnnnnnnnnnnnnnnnnnnnnnnnnnnnnnnnnnnnnnnnnnnnnnnnnnnnnnnnnnnnnnnnnnnnnnnnnnnnnnnnnnnnnnnnnnnnnnnnnnnnnnnnnnnnnnnnnnnnnnnnnnnnnnnnnnnnnnnnnnnnnnnnnnnnnnnnnnnnnnnnnnnnnnnnnnnnnnnnnnnnnnnnnnnnnnnnnnnnnnnnnnnnnnnnnnnnnnnnnnnnnnnnnnnnnnnnnnnnnnnnnnnnnnnnnnnnnnnnnnnnnnnnnnnnnnnnnnnnnnnnnnnnnnnnnnnnnnnnnnnnnnnnnnnnnnnnnnnnnnnnnnnnnnnnnnnnnnnnnnnnnnnnnnnnnnnnnnnnnnnnnnnnnnnnnnnnnnnnnnnnnnnnnnnnnnnnnnnnnnnnnnnnnnnnnnnnnnnnnnnnnnnnnnnnnnnnnnnnnnnnnnnnnnnnnnnnnnnnnnnnnnnnnnnnnnnnnnnnnnnnnnnnnnnnnnnnnnnnnnnnnnnnnnnnnnnnnnnnnnnnnnnnnnnnnnnnnnnnnnnnnnnnnnnnnnnnnnnnnnnnnnnnnnnnnnnnnnnnnnnnnnnnnnnnnnnnnnnnnnnnnnnnnnnnnnnnnnnnnnnnnnnnnnnnnnnnnnnnnnnnnnnnnnnnnnnnnnnnnnnnnnnnnnnnnnnnnnnnnnnnnnnnnnnnnnnnnnnnnnnnnnnnnnnnnnnnnnnnnnnnnnnnnnnnnnnnnnnnnnnnnnnnnnnnnnnnnnnnnnnnnnnnnnnnnnnnnnnnnnnnnnnnnnnnnnnnnnnnnnnnnnnnnnnnnnnnnnnnnnnnnnnnnnnnnnnnnnnnnnnnnnnnnnnnnnnnnnnnnnnnnnnnnnnnnnnnnnnnnnnnnnnnnnnnnnnnnnnnnnnnnnnnnnnnnnnnnnnnnnnnnnnnnnnnnnnnnnnnnnnnnnnnnnnnnnnnnnnnnnnnnnnnnnnnnnnnnnnnnnnnnnnnnnnnnnnnnnnnnnnnnnnnnnnnnnnnnnnnnnnnnnnnnnnnnnnnnnnnnnnnnnnnnnnnnnnnnnnnnnnnnnnnnnnnnnnnnnnnnnnnnnnnnnnnnnnnnnnnnnnnnnnnnnnnnnnnnnnnnnnnnnnnnnnnnnnnnnnnnnnnnnnnnnnnnnnnnnnnnnnnnnnnnnnnnnnnnnnnnnnnnnnnnnnnnnnnnnnnnnnnnnnnnnnnnnnnnnnnnnnnnnnnnnnnnnnnnnnnnnnnnnnnnnnnnnnnnnnnnnnnnnnnnnnnnnnnnnnnnnnnnnnnnnnnnnnnnnnnnnnnnnnnnnnnnnnnnnnnnnnnnnnnnnnnnnnnnnnnnnnnnnnnnnnnnnnnnnnnnnnnnnnnnnnnnnnnnnnnnnnnnnnnnnnnnnnnnnnnnnnnnnnnnnnnnnnnnnnnnnnnnnnnnnnnnnnnnnnnnnnnnnnnnnnnnnnnnnnnnnnnnnnnnnnnnnnnnnnnnnnnnnnnnnnnnnnnnnnnnnnnnnnnnnnnnnnnnnnnnnnnnnnnnnnnnnnnnnnnnnnnnnnnnnnnnnnnnnnnnnnnnnnnnnnnnnnnnnnnnnnnnnnnnnnnnnnnnnnnnnnnnnnnnnnnnnnnnnnnnnnnnnnnnnnnnnnnnnnnnnnnnnnnnnnnnnnnnnnnnnnnnnnnnnnnnnnnnnnnnnnnnnnnnnnnnnnnnnnnnnnnnnnnnnnnnnnnnnnnnnnnnnnnnnnnnnnnnnnnnnnnnnnnnnnnnnnnnnnnnnnnnnnnnnnnnnnnnnnnnnnnnnnnnnnnnnnnnnnnnnnnnnnnnnnnnnnnnnnnnnnnnnnnnnnnnnnnnnnnnnnnnnnnnnnnnnnnnnnnnnnnnnnnnnnnnnnnnnnnnnnnnnnnnnnnnnnnnnnnnnnnnnnnnnnnnnnnnnnnnnnnnnnnnnnnnnnnnnnnnnnnnnnnnnnnnnnnnnnnnnnnnnnnnnnnnnnnnnnnnnnnnnnnnnnnnnnnnnnnnnnnnnnnnnnnnnnnnnnnnnnnnnnnnnnnnnnnnnnnnnnnnnnnnnnnnnnnnnnnnnnnnnnnnnnnnnnnnnnnnnnnnnnnnnnnnnnnnnnnnnnnnnnnnnnnnnnnnnnnnnnnnnnnnnnnnnnnnnnnnnnnnnnnnnnnnnnnnnnnnnnnnnnnnnnnnnnnnnnnnnnnnnnnnnnnnnnnnnnnnnnnnnnnnnnnnnnnnnnnnnnnnnnnnnnnnnnnnnnnnnnnnnnnnnnnnnnnnnnnnnnnnnnnnnnnnnnnnnnnnnnnnnnnnnnnnnnnnnnnnnnnnnnnnnnnnnnnnnnnnnnnnnnnnnnnnnnnnnnnnnnnnnnnnnnnnnnnnnnnnnnnnnnnnnnnnnnnnnnnnnnnnnnnnnnnnnnnnnnnnnnnnnnnnnnnnnnnnnnnnnnnnnnnnnnnnnnnnnnnnnnnnnnnnnnnnnnnnnnnnnnnnnnnnnnnnnnnnnnnnnnnnnnnnnnnnnnnnnnnnnnnnnnnnnnnnnnnnnnnnnnnnnnnnnnnnnnnnnnnnnnnnnnnnnnnnnnnnnnnnnnnnnnnnnnnnnnnnnnnnnnnnnnnnnnnnnnnnnnnnnnnnnnnnnnnnnnnnnnnnnnnnnnnnnnnnnnnnnnnnnnnnnnnnnnnnnnnnnnnnnnnnnnnnnnnnnnnnnnnnnnnnnnnnnnnnnnnnnnnnnnnnnnnnnnnnnnnnnnnnnnnnnnnnnnnnnnnnnnnnnnnnnnnnnnnnnnnnnnnnnnnnnnnnnnnnnnnnnnnnnnnnnnnnnnnnnnnnnnnnnnnnnnnnnnnnnnnnnnnnnnnnnnnnnnnnnnnnnnnnnnnnnnnnnnnnnnnnnnnnnnnnnnnnnnnnnnnnnnnnnnnnnnnnnnnnnnnnnnnnnnnnnnnnnnnnnnnnnnnnnnnnnnnnnnnnnnnnnnnnnnnnnnnnnnnnnnnnnnnnnnnnnnnnnnnnnnnnnnnnnnnnnnnnnnnnnnnnnnnnnnnnnnnnnnnnnnnnnnnnnnnnnnnnnnnnnnnnnnnnnnnnnnnnnnnnnnnnnnnnnnnnnnnnnnnnnnnnnnnnnnnnnnnnnnnnnnnnnnnnnnnnnnnnnnnnnnnnnnnnnnnnnnnnnnnnnnnnnnnnnnnnnnnnnnnnnnnnnnnnnnnnnnnnnnnnnnnnnnnnnnnnnnnnnnnnnnnnnnnnnnnnnnnnnnnnnnnnnnnnnnnnnnnnnnnnnnnnnnnnnnnnnnnnnnnnnnnnnnnnnnnnnnnnnnnnnnnnnnnnnnnnnnnnnnnnnnnnnnnnnnnnnnnnnnnnnnnnnnnnnnnnnnnnnnnnnnnnnnnnnnnnnnnnnnnnnnnnnnnnnnnnnnnnnnnnnnnnnnnnnnnnnnnnnnnnnnnnnnnnnnnnnnnnnnnnnnnnnnnnnnnnnnnnnnnnnnnnnnnnnnnnnnnnnnnnnnnnnnnnnnnnnnnnnnnnnnnnnnnnnnnnnnnnnnnnnnnnnnnnnnnnnnnnnnnnnnnnnnnnnnnnnnnnnnnnnnnnnnnnnnnnnnnnnnnnnnnnnnnnnnnnnnnnnnnnnnnnnnnnnnnnnnnnnnnnnnnnnnnnnnnnnnnnnnnnnnnnnnnnnnnnnnnnnnnnnnnnnnnnnnnnnnnnnnnnnnnnnnnnnnnnnnnnnnnnnnnnnnnnnnnnnnnnnnnnnnnnnnnnnnnnnnnnnnnnnnnnnnnnnnnnnnnnnnnnnnnnnnnnnnnnnnnnnnnnnnnnnnnnnnnnnnnnnnnnnnnnnnnnnnnnnnnnnnnnnnnnnnnnnnnnnnnnnnnnnnnnnnnnnnnnnnnnnnnnnnnnnnnnnnnnnnnnnnnnnnnnnnnnnnnnnnnnnnnnnnnnnnnnnnnnnnnnnnnnnnnnnnnnnnnnnnnnnnnnnnnnnnnnnnnnnnnnnnnnnnnnnnnnnnnnnnnnnnnnnnnnnnnnnnnnnnnnnnnnnnnnnnnnnnnnnnnnnnnnnnnnnnnnnnnnnnnnnnnnnnnnnnnnnnnnnnnnnnnnnnnnnnnnnnnnnnnnnnnnnnnnnnnnnnnnnnnnnnnnnnnnnnnnnnnnnnnnnnnnnnnnnnnnnnnnnnnnnnnnnnnnnnnnnnnnnnnnnnnnnnnnnnnnnnnnnnnnnnnnnnnnnnnnnnnnnnnnnnnnnnnnnnnnnnnnnnnnnnnnnnnnnnnnnnnnnnnnnnnnnnnnnnnnnnnnnnnnnnnnnnnnnnnnnnnnnnnnnnnnnnnnnnnnnnnnnnnnnnnnnnnnnnnnnnnnnnnnnnnnnnnnnnnnnnnnnnnnnnnnnnnnnnnnnnnnnnnnnnnnnnnnnnnnnnnnnnnnnnnnnnnnnnnnnnnnnnnnnnnnnnnnnnnnnnnnnnnnnnnnnnnnnnnnnnnnnnnnnnnnnnnnnnnnnnnnnnnnnnnnnnnnnnnnnnnnnnnnnnnnnnnnnnnnnnnnnnnnnnnnnnnnnnnnnnnnnnnnnnnnnnnnnnnnnnnnnnnnnnnnnnnnnnnnnnnnnnnnnnnnnnnnnnnnnnnnnnnnnnnnnnnnnnnnnnnnnnnnnnnnnnnnnnnnnnnnnnnnnnnnnnnnnnnnnnnnnnnnnnnnnnnnnnnnnnnnnnnnnnnnnnnnnnnnnnnnnnnnnnnnnnnnnnnnnnnnnnnnnnnnnnnnnnnnnnnnnnnnnnnnnnnnnnnnnnnnnnnnnnnnnnnnnnnnnnnnnnnnnnnnnnnnnnnnnnnnnnnnnnnnnnnnnnnnnnnnnnnnnnnnnnnnnnnnnnnnnnnnnnnnnnnnnnnnnnnnnnnnnnnnnnnnnnnnnnnnnnnnnnnnnnnnnnnnnnnnnnnnnnnnnnnnnnnnnnnnnnnnnnnnnnnnnnnnnnnnnnnnnnnnnnnnnnnnnnnnnnnnnnnnnnnnnnnnnnnnnnnnnnnnnnnnnnnnnnnnnnnnnnnnnnnnnnnnnnnnnnnnnnnnnnnnnnnnnnnnnnnnnnnnnnnnnnnnnnnnnnnnnnnnnnnnnnnnnnnnnnnnnnnnnnnnnnnnnnnnnnnnnnnnnnnnnnnnnnnnnnnnnnnnnnnnnnnnnnnnnnnnnnnnnnnnnnnnnnnnnnnnnnnnnnnnnnnnnnnnnnnnnnnnnnnnnnnnnnnnnnnnnnnnnnnnnnnnnnnnnnnnnnnnnnnnnnnnnnnnnnnnnnnnnnnnnnnnnnnnnnnnnnnnnnnnnnnnnnnnnnnnnnnnnnnnnnnnnnnnnnnnnnnnnnnnnnnnnnnnnnnnnnnnnnnnnnnnnnnnnnnnnnnnnnnnnnnnnnnnnnnnnnnnnnnnnnnnnnnnnnnnnnnnnnnnnnnnnnnnnnnnnnnnnnnnnnnnnnnnnnnnnnnnnnnnnnnnnnnnnnnnnnnnnnnnnnnnnnnnnnnnnnnnnnnnnnnnnnnnnnnnnnnnnnnnnnnnnnnnnnnnnnnnnnnnnnnnnnnnnnnnnnnnnnnnnnnnnnnnnnnnnnnnnnnnnnnnnnnnnnnnnnnnnnnnnnnnnnnnnnnnnnnnnnnnnnnnnnnnnnnnnnnnnnnnnnnnnnnnnnnnnnnnnnnnnnnnnnnnnnnnnnnnnnnnnnnnnnnnnnnnnnnnnnnnnnnnnnnnnnnnnnnnnnnnnnnnnnnnnnnnnnnnnnnnnnnnnnnnnnnnnnnnnnnnnnnnnnnnnnnnnnnnnnnnnnnnnnnnnnnnnnnnnnnnnnnnnnnnnnnnnnnnnnnnnnnnnnnnnnnnnnnnnnnnnnnnnnnnnnnnnnnnnnnnnnnnnnnnnnnnnnnnnnnnnnnnnnnnnnnnnnnnnnnnnnnnnnnnnnnnnnnnnnnnnnnnnnnnnnnnnnnnnnnnnnnnnnnnnnnnnnnnnnnnnnnnnnnnnnnnnnnnnnnnnnnnnnnnnnnnnnnnnnnnnnnnnnnnnnnnnnnnnnnnnnnnnnnnnnnnnnnnnnnnnnnnnnnnnnnnnnnnnnnnnnnnnnnnnnnnnnnnnnnnnnnnnnnnnnnnnnnnnnnnnnnnnnnnnnnnnnnnnnnnnnnnnnnnnnnnnnnnnnnnnnnnnnnnnnnnnnnnnnnnnnnnnnnnnnnnnnnnnnnnnnnnnnnnnnnnnnnnnnnnnnnnnnnnnnnnnnnnnnnnnnnnnnnnnnnnnnnnnnnnnnnnnnnnnnnnnnnnnnnnnnnnnnnnnnnnnnnnnnnnnnnnnnnnnnnnnnnnnnnnnnnnnnnnnnnnnnnnnnnnnnnnnnnnnnnnnnnnnnnnnnnnnnnnnnnnnnnnnnnnnnnnnnnnnnnnnnnnnnnnnnnnnnnnnnnnnnnnnnnnnnnnnnnnnnnnnnnnnnnnnnnnnnnnnnnnnnnnnnnnnnnnnnnnnnnnnnnnnnnnnnnnnnnnnnnnnnnnnnnnnnnnnnnnnnnnnnnnnnnnnnnnnnnnnnnnnnnnnnnnnnnnnnnnnnnnnnnnnnnnnnnnnnnnnnnnnnnnnnnnnnnnnnnnnnnnnnnnnnnnnnnnnnnnnnnnnnnnnnnnnnnnnnnnnnnnnnnnnnnnnnnnnnnnnnnnnnnnnnnnnnnnnnnnnnnnnnnnnnnnnnnnnnnnnnnnnnnnnnnnnnnnnnnnnnnnnnnnnnnnnnnnnnnnnnnnnnnnnnnnnnnnnnnnnnnnnnnnnnnnnnnnnnnnnnnnnnnnnnnnnnnnnnnnnnnnnnnnnnnnnnnnnnnnnnnnnnnnnnnnnnnnnnnnnnnnnnnnnnnnnnnnnnnnnnnnnnnnnnnnnnnnnnnnnnnnnnnnnnnnnnnnnnnnnnnnnnnnnnnnnnnnnnnnnnnnnnnnnnnnnnnnnnnnnnnnnnnnnnnnnnnnnnnnnnnnnnnnnnnnnnnnnnnnnnnnnnnnnnnnnnnnnnnnnnnnnnnnnnnnnnnnnnnnnnnnnnnnnnnnnnnnnnnnnnnnnnnnnnnnnnnnnnnnnnnnnnnnnnnnnnnnnnnnnnnnnnnnnnnnnnnnnnnnnnnnnnnnnnnnnnnnnnnnnnnnnnnnnnnnnnnnnnnnnnnnnnnnnnnnnnnnnnnnnnnnnnnnnnnnnnnnnnnnnnnnnnnnnnnnnnnnnnnnnnnnnnnnnnnnnnnnnnnnnnnnnnnnnnnnnnnnnnnnnnnnnnnnnnnnnnnnnnnnnnnnnnnnnnnnnnnnnnnnnnnnnnnnnnnnnnnnnnnnnnnnnnnnnnnnnnnnnnnnnnnnnnnnnnnnnnnnnnnnnnnnnnnnnnnnnnnnnnnnnnnnnnnnnnnnnnnnnnnnnnnnnnnnnnnnnnnnnnnnnnnnnnnnnnnnnnnnnnnnnnnnnnnnnnnnnnnnnnnnnnnnnnnnnnnnnnnnnnnnnnnnnnnnnnnnnnnnnnnnnnnnnnnnnnnnnnnnnnnnnnnnnnnnnnnnnnnnnnnnnnnnnnnnnnnnnnnnnnnnnnnnnnnnnnnnnnnnnnnnnnnnnnnnnnnnnnnnnnnnnnnnnnnnnnnnnnnnnnnnnnnnnnnnnnnnnnnnnnnnnnnnnnnnnnnnnnnnnnnnnnnnnnnnnnnnnnnnnnnnnnnnnnnnnnnnnnnnnnnnnnnnnnnnnnnnnnnnnnnnnnnnnnnnnnnnnnnnnnnnnnnnnnnnnnnnnnnnnnnnnnnnnnnnnnnnnnnnnnnnnnnnnnnnnnnnnnnnnnnnnnnnnnnnnnnnnnnnnnnnnnnnnnnnnnnnnnnnnnnnnnnnnnnnnnnnnnnnnnnnnnnnnnnnnnnnnnnnnnnnnnnnnnnnnnnnnnnnnnnnnnnnnnnnnnnnnnnnnnnnnnnnnnnnnnnnnnnnnnnnnnnnnnnnnnnnnnnnnnnnnnnnnnnnnnnnnnnnnnnnnnnnnnnnnnnnnnnnnnnnnnnnnnnnnnnnnnnnnnnnnnnnnnnnnnnnnnnnnnnnnnnnnnnnnnnnnnnnnnnnnnnnnnnnnnnnnnnnnnnnnnnnnnnnnnnnnnnnnnnnnnnnnnnnnnnnnnnnnnnnnnnnnnnnnnnnnnnnnnnnnnnnnnnnnnnnnnnnnnnnnnnnnnnnnnnnnnnnnnnnnnnnnnnnnnnnnnnnnnnnnnnnnnnnnnnnnnnnnnnnnnnnnnnnnnnnnnnnnnnnnnnnnnnnnnnnnnnnnnnnnnnnnnnnnnnnnnnnnnnnnnnnnnnnnnnnnnnnnnnnnnnnnnnnnnnnnnnnnnnnnnnnnnnnnnnnnnnnnnnnnnnnnnnnnnnnnnnnnnnnnnnnnnnnnnnnnnnnnnnnnnnnnnnnnnnnnnnnnnnnnnnnnnnnnnnnnnnnnnnnnnnnnnnnnnnnnnnnnnnnnnnnnnnnnnnnnnnnnnnnnnnnnnnnnnnnnnnnnnnnnnnnnnnnnnnnnnnnnnnnnnnnnnnnnnnnnnnnnnnnnnnnnnnnnnnnnnnnnnnnnnnnnnnnnnnnnnnnnnnnnnnnnnnnnnnnnnnnnnnnnnnnnnnnnnnnnnnnnnnnnnnnnnnnnnnnnnnnnnnnnnnnnnnnnnnnnnnnnnnnnnnnnnnnnnnnnnnnnnnnnnnnnnnnnnnnnnnnnnnnnnnnnnnnnnnnnnnnnnnnnnnnnnnnnnnnnnnnnnnnnnnnnnnnnnnnnnnnnnnnnnnnnnnnnnnnnnnnnnnnnnnnnnnnnnnnnnnnnnnnnnnnnnnnnnnnnnnnnnnnnnnnnnnnnnnnnnnnnnnnnnnnnnnnnnnnnnnnnnnnnnnnnnnnnnnnnnnnnnnnnnnnnnnnnnnnnnnnnnnnnnnnnnnnnnnnnnnnnnnnnnnnnnnnnnnnnnnnnnnnnnnnnnnnnnnnnnnnnnnnnnnnnnnnnnnnnnnnnnnnnnnnnnnnnnnnnnnnnnnnnnnnnnnnnnnnnnnnnnnnnnnnnnnnnnnnnnnnnnnnnnnnnnnnnnnnnnnnnnnnnnnnnnnnnnnnnnnnnnnnnnnnnnnnnnnnnnnnnnnnnnnnnnnnnnnnnnnnnnnnnnnnnnnnnnnnnnnnnnnnnnnnnnnnnnnnnnnnnnnnnnnnnnnnnnnnnnnnnnnnnnnnnnnnnnnnnnnnnnnnnnnnnnnnnnnnnnnnnnnnnnnnnnnnnnnnnnnnnnnnnnnnnnnnnnnnnnnnnnnnnnnnnnnnnnnnnnnnnnnnnnnnnnnnnnnnnnnnnnnnnnnnnnnnnnnnnnnnnnnnnnnnnnnnnnnnnnnnnnnnnnnnnnnnnnnnnnnnnnnnnnnnnnnnnnnnnnnnnnnnnnnnnnnnnnnnnnnnnnnnnnnnnnnnnnnnnnnnnnnnnnnnnnnnnnnnnnnnnnnnnnnnnnnnnnnnnnnnnnnnnnnnnnnnnnnnnnnnnnnnnnnnnnnnnnnnnnnnnnnnnnnnnnnnnnnnnnnnnnnnnnnnnnnnnnnnnnnnnnnnnnnnnnnnnnnnnnnnnnnnnnnnnnnnnnnnnnnnnnnnnnnnnnnnnnnnnnnnnnnnnnnnnnnnnnnnnnnnnnnnnnnnnnnnnnnnnnnnnnnnnnnnnnnnnnnnnnnnnnnnnnnnnnnnnnnnnnnnnnnnnnnnnnnnnnnnnnnnnnnnnnnnnnnnnnnnnnnnnnnnnnnnnnnnnnnnnnnnnnnnnnnnnnnnnnnnnnnnnnnnnnnnnnnnnnnnnnnnnnnnnnnnnnnnnnnnnnnnnnnnnnnnnnnnnnnnnnnnnnnnnnnnnnnnnnnnnnnnnnnnnnnnnnnnnnnnnnnnnnnnnnnnnnnnnnnnnnnnnnnnnnnnnnnnnnnnnnnnnnnnnnnnnnnnnnnnnnnnnnnnnnnnnnnnnnnnnnnnnnnnnnnnnnnnnnnnnnnnnnnnnnnnnnnnnnnnnnnnnnnnnnnnnnnnnnnnnnnnnnnnnnnnnnnnnnnnnnnnnnnnnnnnnnnnnnnnnnnnnnnnnnnnnnnnnnnnnnnnnnnnnnnnnnnnnnnnnnnnnnnnnnnnnnnnnnnnnnnnnnnnnnnnnnnnnnnnnnnnnnnnnnnnnnnnnnnnnnnnnnnnnnnnnnnnnnnnnnnnnnnnnnnnnnnnnnnnnnnnnnnnnnnnnnnnnnnnnnnnnnnnnnnnnnnnnnnnnnnnnnnnnnnnnnnnnnnnnnnnnnnnnnnnnnnnnnnnnnnnnnnnnnnnnnnnnnnnnnnnnnnnnnnnnnnnnnnnnnnnnnnnnnnnnnnnnnnnnnnnnnnnnnnnnnnnnnnnnnnnnnnnnnnnnnnnnnnnnnnnnnnnnnnnnnnnnnnnnnnnnnnnnnnnnnnnnnnnnnnnnnnnnnnnnnnnnnnnnnnnnnnnnnnnnnnnnnnnnnnnnnnnnnnnnnnnnnnnnnnnnnnnnnnnnnnnnnnnnnnnnnnnnnnnnnnnnnnnnnnnnnnnnnnnnnnnnnnnnnnnnnnnnnnnnnnnnnnnnnnnnnnnnnnnnnnnnnnnnnnnnnnnnnnnnnnnnnnnnnnnnnnnnnnnnnnnnnnnnnnnnnnnnnnnnnnnnnnnnnnnnnnnnnnnnnnnnnnnnnnnnnnnnnnnnnnnnnnnnnnnnnnnnnnnnnnnnnnnnnnnnnnnnnnnnnnnnnnnnnnnnnnnnnnnnnnnnnnnnnnnnnnnnnnnnnnnnnnnnnnnnnnnnnnnnnnnnnnnnnnnnnnnnnnnnnnnnnnnnnnnnnnnnnnnnnnnnnnnnnnnnnnnnnnnnnnnnnnnnnnnnnnnnnnnnnnnnnnnnnnnnnnnnnnnnnnnnnnnnnnnnnnnnnnnnnnnnnnnnnnnnnnnnnnnnnnnnnnnnnnnnnnnnnnnnnnnnnnnnnnnnnnnnnnnnnnnnnnnnnnnnnnnnnnnnnnnnnnnnnnnnnnnnnnnnnnnnnnnnnnnnnnnnnnnnnnnnnnnnnnnnnnnnnnnnnnnnnnnnnnnnnnnnnnnnnnnnnnnnnnnnnnnnnnnnnnnnnnnnnnnnnnnnnnnnnnnnnnnnnnnnnnnnnnnnnnnnnnnnnnnnnnnnnnnnnnnnnnnnnnnnnnnnnnnnnnnnnnnnnnnnnnnnnnnnnnnnnnnnnnnnnnnnnnnnnnnnnnnnnnnnnnnnnnnnnnnnnnnnnnnnnnnnnnnnnnnnnnnnnnnnnnnnnnnnnnnnnnnnnnnnnnnnnnnnnnnnnnnnnnnnnnnnnnnnnnnnnnnnnnnnnnnnnnnnnnnnnnnnnnnnnnnnnnnnnnnnnnnnnnnnnnnnnnnnnnnnnnnnnnnnnnnnnnnnnnnnnnnnnnnnnnnnnnnnnnnnnnnnnnnnnnnnnnnnnnnnnnnnnnnnnnnnnnnnnnnnnnnnnnnnnnnnnnnnnnnnnnnnnnnnnnnnnnnnnnnnnnnnnnnnnnnnnnnnnnnnnnnnnnnnnnnnnnnnnnnnnnnnnnnnnnnnnnnnnnnnnnnnnnnnnnnnnnnnnnnnnnnnnnnnnnnnnnnnnnnnnnnnnnnnnnnnnnnnnnnnnnnnnnnnnnnnnnnnnnnnnnnnnnnnnnnnnnnnnnnnnnnnnnnnnnnnnnnnnnnnnnnnnnnnnnnnnnnnnnnnnnnnnnnnnnnnnnnnnnnnnnnnnnnnnnnnnnnnnnnnnnnnnnnnnnnnnnnnnnnnnnnnnnnnnnnnnnnnnnnnnnnnnnnnnnnnnnnnnnnnnnnnnnnnnnnnnnnnnnnnnnnnnnnnnnnnnnnnnnnnnnnnnnnnnnnnnnnnnnnnnnnnnnnnnnnnnnnnnnnnnnnnnnnnnnnnnnnnnnnnnnnnnnnnnnnnnnnnnnnnnnnnnnnnnnnnnnnnnnnnnnnnnnnnnnnnnnnnnnnnnnnnnnnnnnnnnnnnnnnnnnnnnnnnnnnnnnnnnnnnnnnnnnnnnnnnnnnnnnnnnnnnnnnnnnnnnnnnnnnnnnnnnnnnnnnnnnnnnnnnnnnnnnnnnnnnnnnnnnnnnnnnnnnnnnnnnnnnnnnnnnnnnnnnnnnnnnnnnnnnnnnnnnnnnnnnnnnnnnnnnnnnnnnnnnnnnnnnnnnnnnnnnnnnnnnnnnnnnnnnnnnnnnnnnnnnnnnnnnnnnnnnnnnnnnnnnnnnnnnnnnnnnnnnnnnnnnnnnnnnnnnnnnnnnnnnnnnnnnnnnnnnnnnnnnnnnnnnnnnnnnnnnnnnnnnnnnnnnnnnnnnnnnnnnnnnnnnnnnnnnnnnnnnnnnnnnnnnnnnnnnnnnnnnnnnnnnnnnnnnnnnnnnnnnnnnnnnnnnnnnnnnnnnnnnnnnnnnnnnnnnnnnnnnnnnnnnnnnnnnnnnnnnnnnnnnnnnnnnnnnnnnnnnnnnnnnnnnnnnnnnnnnnnnnnnnnnnnnnnnnnnnnnnnnnnnnnnnnnnnnnnnnnnnnnnnnnnnnnnnnnnnnnnnnnnnnnnnnnnnnnnnnnnnnnnnnnnnnnnnnnnnnnnnnnnnnnnnnnnnnnnnnnnnnnnnnnnnnnnnnnnnnnnnnnnnnnnnnnnnnnnnnnnnnnnnnnnnnnnnnnnnnnnnnnnnnnnnnnnnnnnnnnnnnnnnnnnnnnnnnnnnnnnnnnnnnnnnnnnnnnnnnnnnnnnnnnnnnnnnnnnnnnnnnnnnnnnnnnnnnnnnnnnnnnnnnnnnnnnnnnnnnnnnnnnnnnnnnnnnnnnnnnnnnnnnnnnnnnnnnnnnnnnnnnnnnnnnnnnnnnnnnnnnnnnnnnnnnnnnnnnnnnnnnnnnnnnnnnnnnnnnnnnnnnnnnnnnnnnnnnnnnnnnnnnnnnnnnnnnnnnnnnnnnnnnnnnnnnnnnnnnnnnnnnnnnnnnnnnnnnnnnnnnnnnnnnnnnnnnnnnnnnnnnnnnnnnnnnnnnnnnnnnnnnnnnnnnnnnnnnnnnnnnnnnnnnnnnnnnnnnnnnnnnnnnnnnnnnnnnnnnnnnnnnnnnnnnnnnnnnnnnnnnnnnnnnnnnnnnnnnnnnnnnnnnnnnnnnnnnnnnnnnnnnnnnnnnnnnnnnnnnnnnnnnnnnnnnnnnnnnnnnnnnnnnnnnnnnnnnnnnnnnnnnnnnnnnnnnnnnnnnnnnnnnnnnnnnnnnnnnnnnnnnnnnnnnnnnnnnnnnnnnnnnnnnnnnnnnnnnnnnnnnnnnnnnnnnnnnnnnnnnnnnnnnnnnnnnnnnnnnnnnnnnnnnnnnnnnnnnnnnnnnnnnnnnnnnnnnnnnnnnnnnnnnnnnnnnnnnnnnnnnnnnnnnnnnnnnnnnnnnnnnnnnnnnnnnnnnnnnnnnnnnnnnnnnnnnnnnnnnnnnnnnnnnnnnnnnnnnnnnnnnnnnnnnnnnnnnnnnnnnnnnnnnnnnnnnnnnnnnnnnnnnnnnnnnnnnnnnnnnnnnnnnnnnnnnnnnnnnnnnnnnnnnnnnnnnnnnnnnnnnnnnnnnnnnnnnnnnnnnnnnnnnnnnnnnnnnnnnnnnnnnnnnnnnnnnnnnnnnnnnnnnnnnnnnnnnnnnnnnnnnnnnnnnnnnnnnnnnnnnnnnnnnnnnnnnnnnnnnnnnnnnnnnnnnnnnnnnnnnnnnnnnnnnnnnnnnnnnnnnnnnnnnnnnnnnnnnnnnnnnnnnnnnnnnnnnnnnnnnnnnnnnnnnnnnnnnnnnnnnnnnnnnnnnnnnnnnnnnnnnnnnnnnnnnnnnnnnnnnnnnnnnnnnnnnnnnnnnnnnnnnnnnnnnnnnnnnnnnnnnnnnnnnnnnnnnnnnnnnnnnnnnnnnnnnnnnnnnnnnnnnnnnnnnnnnnnnnnnnnnnnnnnnnnnnnnnnnnnnnnnnnnnnnnnnnnnnnnnnnnnnnnnnnnnnnnnnnnnnnnnnnnnnnnnnnnnnnnnnnnnnnnnnnnnnnnnnnnnnnnnnnnnnnnnnnnnnnnnnnnnnnnnnnnnnnnnnnnnnnnnnnnnnnnnnnnnnnnnnnnnnnnnnnnnnnnnnnnnnnnnnnnnnnnnnnnnnnnnnnnnnnnnnnnnnnnnnnnnnnnnnnnnnnnnnnnnnnnnnnnnnnnnnnnnnnnnnnnnnnnnnnnnnnnnnnnnnnnnnnnnnnnnnnnnnnnnnnnnnnnnnnnnnnnnnnnnnnnnnnnnnnnnnnnnnnnnnnnnnnnnnnnnnnnnnnnnnnnnnnnnnnnnnnnnnnnnnnnnnnnnnnnnnnnnnnnnnnnnnnnnnnnnnnnnnnnnnnnnnnnnnnnnnnnnnnnnnnnnnnnnnnnnnnnnnnnnnnnnnnnnnnnnnnnnnnnnnnnnnnnnnnnnnnnnnnnnnnnnnnnnnnnnnnnnnnnnnnnnnnnnnnnnnnnnnnnnnnnnnnnnnnnnnnnnnnnnnnnnnnnnnnnnnnnnnnnnnnnnnnnnnnnnnnnnnnnnnnnnnnnnnnnnnnnnnnnnnnnnnnnnnnnnnnnnnnnnnnnnnnnnnnnnnnnnnnnnnnnnnnnnnnnnnnnnnnnnnnnnnnnnnnnnnnnnnnnnnnnnnnnnnnnnnnnnnnnnnnnnnnnnnnnnnnnnnnnnnnnnnnnnnnnnnnnnnnnnnnnnnnnnnnnnnnnnnnnnnnnnnnnnnnnnnnnnnnnnnnnnnnnnnnnnnnnnnnnnnnnnnnnnnnnnnnnnnnnnnnnnnnnnnnnnnnnnnnnnnnnnnnnnnnnnnnnnnnnnnnnnnnnnnnnnnnnnnnnnnnnnnnnnnnnnnnnnnnnnnnnnnnnnnnnnnnnnnnnnnnnnnnnnnnnnnnnnnnnnnnnnnnnnnnnnnnnnnnnnnnnnnnnnnnnnnnnnnnnnnnnnnnnnnnnnnnnnnnnnnnnnnnnnnnnnnnnnnnnnnnnnnnnnnnnnnnnnnnnnnnnnnnnnnnnnnnnnnnnnnnnnnnnnnnnnnnnnnnnnnnnnnnnnnnnnnnnnnnnnnnnnnnnnnnnnnnnnnnnnnnnnnnnnnnnnnnnnnnnnnnnnnnnnnnnnnnnnnnnnnnnnnnnnnnnnnnnnnnnnnnnnnnnnnnnnnnnnnnnnnnnnnnnnnnnnnnnnnnnnnnnnnnnnnnnnnnnnnnnnnnnnnnnnnnnnnnnnnnnnnnnnnnnnnnnnnnnnnnnnnnnnnnnnnnnnnnnnnnnnnnnnnnnnnnnnnnnnnnnnnnnnnnnnnnnnnnnnnnnnnnnnnnnnnnnnnnnnnnnnnnnnnnnnnnnnnnnnnnnnnnnnnnnnnnnnnnnnnnnnnnnnnnnnnnnnnnnnnnnnnnnnnnnnnnnnnnnnnnnnnnnnnnnnnnnnnnnnnnnnnnnnnnnnnnnnnnnnnnnnnnnnnnnnnnnnnnnnnnnnnnnnnnnnnnnnnnnnnnnnnnnnnnnnnnnnnnnnnnnnnnnnnnnnnnnnnnnnnnnnnnnnnnnnnnnnnnnnnnnnnnnnnnnnnnnnnnnnnnnnnnnnnnnnnnnnnnnnnnnnnnnnnnnnnnnnnnnnnnnnnnnnnnnnnnnnnnnnnnnnnnnnnnnnnnnnnnnnnnnnnnnnnnnnnnnnnnnnnnnnnnnnnnnnnnnnnnnnnnnnnnnnnnnnnnnnnnnnnnnnnnnnnnnnnnnnnnnnnnnnnnnnnnnnnnnnnnnnnnnnnnnnnnnnnnnnnnnnnnnnnnnnnnnnnnnnnnnnnnnnnnnnnnnnnnnnnnnnnnnnnnnnnnnnnnnnnnnnnnnnnnnnnnnnnnnnnnnnnnnnnnnnnnnnnnnnnnnnnnnnnnnnnnnnnnnnnnnnnnnnnnnnnnnnnnnnnnnnnnnnnnnnnnnnnnnnnnnnnnnnnnnnnnnnnnnnnnnnnnnnnnnnnnnnnnnnnnnnnnnnnnnnnnnnnnnnnnnnnnnnnnnnnnnnnnnnnnnnnnnnnnnnnnnnnnnnnnnnnnnnnnnnnnnnnnnnnnnnnnnnnnnnnnnnnnnnnnnnnnnnnnnnnnnnnnnnnnnnnnnnnnnnnnnnnnnnnnnnnnnnnnnnnnnnnnnnnnnnnnnnnnnnnnnnnnnnnnnnnnnnnnnnnnnnnnnnnnnnnnnnnnnnnnnnnnnnnnnnnnnnnnnnnnnnnnnnnnnnnnnnnnnnnnnnnnnnnnnnnnnnnnnnnnnnnnnnnnnnnnnnnnnnnnnnnnnnnnnnnnnnnnnnnnnnnnnnnnnnnnnnnnnnnnnnnnnnnnnnnnnnnnnnnnnnnnnnnnnnnnnnnnnnnnnnnnnnnnnnnnnnnnnnnnnnnnnnnnnnnnnnnnnnnnnnnnnnnnnnnnnnnnnnnnnnnnnnnnnnnnnnnnnnnnnnnnnnnnnnnnnnnnnnnnnnnnnnnnnnnnnnnnnnnnnnnnnnnnnnnnnnnnnnnnnnnnnnnnnnnnnnnnnnnnnnnnnnnnnnnnnnnnnnnnnnnnnnnnnnnnnnnnnnnnnnnnnnnnnnnnnnnnnnnnnnnnnnnnnnnnnnnnnnnnnnnnnnnnnnnnnnnnnnnnnnnnnnnnnnnnnnnnnnnnnnnnnnnnnnnnnnnnnnnnnnnnnnnnnnnnnnnnnnnnnnnnnnnnnnnnnnnnnnnnnnnnnnnnnnnnnnnnnnnnnnnnnnnnnnnnnnnnnnnnnnnnnnnnnnnnnnnnnnnnnnnnnnnnnnnnnnnnnnnnnnnnnnnnnnnnnnnnnnnnnnnnnnnnnnnnnnnnnnnnnnnnnnnnnnnnnnnnnnnnnnnnnnnnnnnnnnnnnnnnnnnnnnnnnnnnnnnnnnnnnnnnnnnnnnnnnnnnnnnnnnnnnnnnnnnnnnnnnnnnnnnnnnnnnnnnnnnnnnnnnnnnnnnnnnnnnnnnnnnnnnnnnnnnnnnnnnnnnnnnnnnnnnnnnnnnnnnnnnnnnnnnnnnnnnnnnnnnnnnnnnnnnnnnnnnnnnnnnnnnnnnnnnnnnnnnnnnnnnnnnnnnnnnnnnnnnnnnnnnnnnnnnnnnnnnnnnnnnnnnnnnnnnnnnnnnnnnnnnnnnnnnnnnnnnnnnnnnnnnnnnnnnnnnnnnnnnnnnnnnnnnnnnnnnnnnnnnnnnnnnnnnnnnnnnnnnnnnnnnnnnnnnnnnnnnnnnnnnnnnnnnnnnnnnnnnnnnnnnnnnnnnnnnnnnnnnnnnnnnnnnnnnnnnnnnnnnnnnnnnnnnnnnnnnnnnnnnnnnnnnnnnnnnnnnnnnnnnnnnnnnnnnnnnnnnnnnnnnnnnnnnnnnnnnnnnnnnnnnnnnnnnnnnnnnnnnnnnnnnnnnnnnnnnnnnnnnnnnnnnnnnnnnnnnnnnnnnnnnnnnnnnnnnnnnnnnnnnnnnnnnnnnnnnnnnnnnnnnnnnnnnnnnnnnnnnnnnnnnnnnnnnnnnnnnnnnnnnnnnnnnnnnnnnnnnnnnnnnnnnnnnnnnnnnnnnnnnnnnnnnnnnnnnnnnnnnnnnnnnnnnnnnnnnnnnnnnnnnnnnnnnnnnnnnnnnnnnnnnnnnnnnnnnnnnnnnnnnnnnnnnnnnnnnnnnnnnnnnnnnnnnnnnnnnnnnnnnnnnnnnnnnnnnnnnnnnnnnnnnnnnnnnnnnnnnnnnnnnnnnnnnnnnnnnnnnnnnnnnnnnnnnnnnnnnnnnnnnnnnnnnnnnnnnnnnnnnnnnnnnnnnnnnnnnnnnnnnnnnnnnnnnnnnnnnnnnnnnnnnnnnnnnnnnnnnnnnnnnnnnnnnnnnnnnnnnnnnnnnnnnnnnnnnnnnnnnnnnnnnnnnnnnnnnnnnnnnnnnnnnnnnnnnnnnnnnnnnnnnnnnnnnnnnnnnnnnnnnnnnnnnnnnnnnnnnnnnnnnnnnnnnnnnnnnnnnnnnnnnnnnnnnnnnnnnnnnnnnnnnnnnnnnnnnnnnnnnnnnnnnnnnnnnnnnnnnnnnnnnnnnnnnnnnnnnnnnnnnnnnnnnnnnnnnnnnnnnnnnnnnnnnnnnnnnnnnnnnnnnnnnnnnnnnnnnnnnnnnnnnnnnnnnnnnnnnnnnnnnnnnnnnnnnnnnnnnnnnnnnnnnnnnnnnnnnnnnnnnnnnnnnnnnnnnnnnnnnnnnnnnnnnnnnnnnnnnnnnnnnnnnnnnnnnnnnnnnnnnnnnnnnnnnnnnnnnnnnnnnnnnnnnnnnnnnnnnnnnnnnnnnnnnnnnnnnnnnnnnnnnnnnnnnnnnnnnnnnnnnnnnnnnnnnnnnnnnnnnnnnnnnnnnnnnnnnnnnnnnnnnnnnnnnnnnnnnnnnnnnnnnnnnnnnnnnnnnnnnnnnnnnnnnnnnnnnnnnnnnnnnnnnnnnnnnnnnnnnnnnnnnnnnnnnnnnnnnnnnnnnnnnnnnnnnnnnnnnnnnnnnnnnnnnnnnnnnnnnnnnnnnnnnnnnnnnnnnnnnnnnnnnnnnnnnnnnnnnnnnnnnnnnnnnnnnnnnnnnnnnnnnnnnnnnnnnnnnnnnnnnnnnnnnnnnnnnnnnnnnnnnnnnnnnnnnnnnnnnnnnnnnnnnnnnnnnnnnnnnnnnnnnnnnnnnnnnnnnnnnnnnnnnnnnnnnnnnnnnnnnnnnnnnnnnnnnnnnnnnnnnnnnnnnnnnnnnnnnnnnnnnnnnnnnnnnnnnnnnnnnnnnnnnnnnnnnnnnnnnnnnnnnnnnnnnnnnnnnnnnnnnnnnnnnnnnnnnnnnnnnnnnnnnnnnnnnnnnnnnnnnnnnnnnnnnnnnnnnnnnnnnnnnnnnnnnnnnnnnnnnnnnnnnnnnnnnnnnnnnnnnnnnnnnnnnnnnnnnnnnnnnnnnnnnnnnnnnnnnnnnnnnnnnnnnnnnnnnnnnnnnnnnnnnnnnnnnnnnnnnnnnnnnnnnnnnnnnnnnnnnnnnnnnnnnnnnnnnnnnnnnnnnnnnnnnnnnnnnnnnnnnnnnnnnnnnnnnnnnnnnnnnnnnnnnnnnnnnnnnnnnnnnnnnnnnnnnnnnnnnnnnnnnnnnnnnnnnnnnnnnnnnnnnnnnnnnnnnnnnnnnnnnnnnnnnnnnnnnnnnnnnnnnnnnnnnnnnnnnnnnnnnnnnnnnnnnnnnnnnnnnnnnnnnnnnnnnnnnnnnnnnnnnnnnnnnnnnnnnnnnnnnnnnnnnnnnnnnnnnnnnnnnnnnnnnnnnnnnnnnnnnnnnnnnnnnnnnnnnnnnnnnnnnnnnnnnnnnnnnnnnnnnnnnnnnnnnnnnnnnnnnnnnnnnnnnnnnnnnnnnnnnnnnnnnnnnnnnnnnnnnnnnnnnnnnnnnnnnnnnnnnnnnnnnnnnnnnnnnnnnnnnnnnnnnnnnnnnnnnnnnnnnnnnnnnnnnnnnnnnnnnnnnnnnnnnnnnnnnnnnnnnnnnnnnnnnnnnnnnnnnnnnnnnnnnnnnnnnnnnnnnnnnnnnnnnnnnnnnnnnnnnnnnnnnnnnnnnnnnnnnnnnnnnnnnnnnnnnnnnnnnnnnnnnnnnnnnnnnnnnnnnnnnnnnnnnnnnnnnnnnnnnnnnnnnnnnnnnnnnnnnnnnnnnnnnnnnnnnnnnnnnnnnnnnnnnnnnnnnnnnnnnnnnnnnnnnnnnnnnnnnnnnnnnnnnnnnnnnnnnnnnnnnnnnnnnnnnnnnnnnnnnnnnnnnnnnnnnnnnnnnnnnnnnnnnnnnnnnnnnnnnnnnnnnnnnnnnnnnnnnnnnnnnnnnnnnnnnnnnnnnnnnnnnnnnnnnnnnnnnnnnnnnnnnnnnnnnnnnnnnnnnnnnnnnnnnnnnnnnnnnnnnnnnnnnnnnnnnnnnnnnnnnnnnnnnnnnnnnnnnnnnnnnnnnnnnnnnnnnnnnnnnnnnnnnnnnnnnnnnnnnnnnnnnnnnnnnnnnnnnnnnnnnnnnnnnnnnnnnnnnnnnnnnnnnnnnnnnnnnnnnnnnnnnnnnnnnnnnnnnnnnnnnnnnnnnnnnnnnnnnnnnnnnnnnnnnnnnnnnnnnnnnnnnnnnnnnnnnnnnnnnnnnnnnnnnnnnnnnnnnnnnnnnnnnnnnnnnnnnnnnnnnnnnnnnnnnnnnnnnnnnnnnnnnnnnnnnnnnnnnnnnnnnnnnnnnnnnnnnnnnnnnnnnnnnnnnnnnnnnnnnnnnnnnnnnnnnnnnnnnnnnnnnnnnnnnnnnnnnnnnnnnnnnnnnnnnnnnnnnnnnnnnnnnnnnnnnnnnnnnnnnnnnnnnnnnnnnnnnnnnnnnnnnnnnnnnnnnnnnnnnnnnnnnnnnnnnnnnnnnnnnnnnnnnnnnnnnnnnnnnnnnnnnnnnnnnnnnnnnnnnnnnnnnnnnnnnnnnnnnnnnnnnnnnnnnnnnnnnnnnnnnnnnnnnnnnnnnnnnnnnnnnnnnnnnnnnnnnnnnnnnnnnnnnnnnnnnnnnnnnnnnnnnnnnnnnnnnnnnnnnnnnnnnnnnnnnnnnnnnnnnnnnnnnnnnnnnnnnnnnnnnnnnnnnnnnnnnnnnnnnnnnnnnnnnnnnnnnnnnnnnnnnnnnnnnnnnnnnnnnnnnnnnnnnnnnnnnnnnnnnnnnnnnnnnnnnnnnnnnnnnnnnnnnnnnnnnnnnnnnnnnnnnnnnnnnnnnnnnnnnnnnnnnnnnnnnnnnnnnnnnnnnnnnnnnnnnnnnnnnnnnnnnnnnnnnnnnnnnnnnnnnnnnnnnnnnnnnnnnnnnnnnnnnnnnnnnnnnnnnnnnnnnnnnnnnnnnnnnnnnnnnnnnnnnnnnnnnnnnnnnnnnnnnnnnnnnnnnnnnnnnnnnnnnnnnnnnnnnnnnnnnnnnnnnnnnnnnnnnnnnnnnnnnnnnnnnnnnnnnnnnnnnnnnnnnnnnnnnnnnnnnnnnnnnnnnnnnnnnnnnnnnnnnnnnnnnnnnnnnnnnnnnnnnnnnnnnnnnnnnnnnnnnnnnnnnnnnnnnnnnnnnnnnnnnnnnnnnnnnnnnnnnnnnnnnnnnnnnnnnnnnnnnnnnnnnnnnnnnnnnnnnnnnnnnnnnnnnnnnnnnnnnnnnnnnnnnnnnnnnnnnnnnnnnnnnnnnnnnnnnnnnnnnnnnnnnnnnnnnnnnnnnnnnnnnnnnnnnnnnnnnnnnnnnnnnnnnnnnnnnnnnnnnnnnnnnnnnnnnnnnnnnnnnnnnnnnnnnnnnnnnnnnnnnnnnnnnnnnnnnnnnnnnnnnnnnnnnnnnnnnnnnnnnnnnnnnnnnnnnnnnnnnnnnnnnnnnnnnnnnnnnnnnnnnnnnnnnnnnnnnnnnnnnnnnnnnnnnnnnnnnnnnnnnnnnnnnnnnnnnnnnnnnnnnnnnnnnnnnnnnnnnnnnnnnnnnnnnnnnnnnnnnnnnnnnnnnnnnnnnnnnnnnnnnnnnnnnnnnnnnnnnnnnnnnnnnnnnnnnnnnnnnnnnnnnnnnnnnnnnnnnnnnnnnnnnnnnnnnnnnnnnnnnnnnnnnnnnnnnnnnnnnnnnnnnnnnnnnnnnnnnnnnnnnnnnnnnnnnnnnnnnnnnnnnnnnnnnnnnnnnnnnnnnnnnnnnnnnnnnnnnnnnnnnnnnnnnnnnnnnnnnnnnnnnnnnnnnnnnnnnnnnnnnnnnnnnnnnnnnnnnnnnnnnnnnnnnnnnnnnnnnnnnnnnnnnnnnnnnnnnnnnnnnnnnnnnnnnnnnnnnnnnnnnnnnnnnnnnnnnnnnnnnnnnnnnnnnnnnnnnnnnnnnnnnnnnnnnnnnnnnnnnnnnnnnnnnnnnnnnnnnnnnnnnnnnnnnnnnnnnnnnnnnnnnnnnnnnnnnnnnnnnnnnnnnnnnnnnnnnnnnnnnnnnnnnnnnnnnnnnnnnnnnnnnnnnnnnnnnnnnnnnnnnnnnnnnnnnnnnnnnnnnnnnnnnnnnnnnnnnnnnnnnnnnnnnnnnnnnnnnnnnnnnnnnnnnnnnnnnnnnnnnnnnnnnnnnnnnnnnnnnnnnnnnnnnnnnnnnnnnnnnnnnnnnnnnnnnnnnnnnnnnnnnnnnnnnnnnnnnnnnnnnnnnnnnnnnnnnnnnnnnnnnnnnnnnnnnnnnnnnnnnnnnnnnnnnnnnnnnnnnnnnnnnnnnnnnnnnnnnnnnnnnnnnnnnnnnnnnnnnnnnnnnnnnnnnnnnnnnnnnnnnnnnnnnnnnnnnnnnnnnnnnnnnnnnnnnnnnnnnnnnnnnnnnnnnnnnnnnnnnnnnnnnnnnnnnnnnnnnnnnnnnnnnnnnnnnnnnnnnnnnnnnnnnnnnnnnnnnnnnnnnnnnnnnnnnnnnnnnnnnnnnnnnnnnnnnnnnnnnnnnnnnnnnnnnnnnnnnnnnnnnnnnnnnnnnnnnnnnnnnnnnnnnnnnnnnnnnnnnnnnnnnnnnnnnnnnnnnnnnnnnnnnnnnnnnnnnnnnnnnnnnnnnnnnnnnnnnnnnnnnnnnnnnnnnnnnnnnnnnnnnnnnnnnnnnnnnnnnnnnnnnnnnnnnnnnnnnnnnnnnnnnnnnnnnnnnnnnnnnnnnnnnnnnnnnnnnnnnnnnnnnnnnnnnnnnnnnnnnnnnnnnnnnnnnnnnnnnnnnnnnnnnnnnnnnnnnnnnnnnnnnnnnnnnnnnnnnnnnnnnnnnnnnnnnnnnnnnnnnnnnnnnnnnnnnnnnnnnnnnnnnnnnnnnnnnnnnnnnnnnnnnnnnnnnnnnnnnnnnnnnnnnnnnnnnnnnnnnnnnnnnnnnnnnnnnnnnnnnnnnnnnnnnnnnnnnnnnnnnnnnnnnnnnnnnnnnnnnnnnnnnnnnnnnnnnnnnnnnnnnnnnnnnnnnnnnnnnnnnnnnnnnnnnnnnnnnnnnnnnnnnnnnnnnnnnnnnnnnnnnnnnnnnnnnnnnnnnnnnnnnnnnnnnnnnnnnnnnnnnnnnnnnnnnnnnnnnnnnnnnnnnnnnnnnnnnnnnnnnnnnnnnnnnnnnnnnnnnnnnnnnnnnnnnnnnnnnnnnnnnnnnnnnnnnnnnnnnnnnnnnnnnnnnnnnnnnnnnnnnnnnnnnnnnnnnnnnnnnnnnnnnnnnnnnnnnnnnnnnnnnnnnnnnnnnnnnnnnnnnnnnnnnnnnnnnnnnnnnnnnnnnnnnnnnnnnnnnnnnnnnnnnnnnnnnnnnnnnnnnnnnnnnnnnnnnnnnnnnnnnnnnnnnnnnnnnnnnnnnnnnnnnnnnnnnnnnnnnnnnnnnnnnnnnnnnnnnnnnnnnnnnnnnnnnnnnnnnnnnnnnnnnnnnnnnnnnnnnnnnnnnnnnnnnnnnnnnnnnnnnnnnnnnnnnnnnnnnnnnnnnnnnnnnnnnnnnnnnnnnnnnnnnnnnnnnnnnnnnnnnnnnnnnnnnnnnnnnnnnnnnnnnnnnnnnnnnnnnnnnnnnnnnnnnnnnnnnnnnnnnnnnnnnnnnnnnnnnnnnnnnnnnnnnnnnnnnnnnnnnnnnnnnnnnnnnnnnnnnnnnnnnnnnnnnnnnnnnnnnnnnnnnnnnnnnnnnnnnnnnnnnnnnnnnnnnnnnnnnnnnnnnnnnnnnnnnnnnnnnnnnnnnnnnnnnnnnnnnnnnnnnnnnnnnnnnnnnnnnnnnnnnnnnnnnnnnnnnnnnnnnnnnnnnnnnnnnnnnnnnnnnnnnnnnnnnnnnnnnnnnnnnnnnnnnnnnnnnnnnnnnnnnnnnnnnnnnnnnnnnnnnnnnnnnnnnnnnnnnnnnnnnnnnnnnnnnnnnnnnnnnnnnnnnnnnnnnnnnnnnnnnnnnnnnnnnnnnnnnnnnnnnnnnnnnnnnnnnnnnnnnnnnnnnnnnnnnnnnnnnnnnnnnnnnnnnnnnnnnnnnnnnnnnnnnnnnnnnnnnnnnnnnnnnnnnnnnnnnnnnnnnnnnnnnnnnnnnnnnnnnnnnnnnnnnnnnnnnnnnnnnnnnnnnnnnnnnnnnnnnnnnnnnnnnnnnnnnnnnnnnnnnnnnnnnnnnnnnnnnnnnnnnnnnnnnnnnnnnnnnnnnnnnnnnnnnnnnnnnnnnnnnnnnnnnnnnnnnnnnnnnnnnnnnnnnnnnnnnnnnnnnnnnnnnnnnnnnnnnnnnnnnnnnnnnnnnnnnnnnnnnnnnnnnnnnnnnnnnnnnnnnnnnnnnnnnnnnnnnnnnnnnnnnnnnnnnnnnnnnnnnnnnnnnnnnnnnnnnnnnnnnnnnnnnnnnnnnnnnnnnnnnnnnnnnnnnnnnnnnnnnnnnnnnnnnnnnnnnnnnnnnnnnnnnnnnnnnnnnnnnnnnnnnnnnnnnnnnnnnnnnnnnnnnnnnnnnnnnnnnnnnnnnnnnnnnnnnnnnnnnnnnnnnnnnnnnnnnnnnnnnnnnnnnnnnnnnnnnnnnnnnnnnnnnnnnnnnnnnnnnnnnnnnnnnnnnnnnnnnnnnnnnnnnnnnnnnnnnnnnnnnnnnnnnnnnnnnnnnnnnnnnnnnnnnnnnnnnnnnnnnnnnnnnnnnnnnnnnnnnnnnnnnnnnnnnnnnnnnnnnnnnnnnnnnnnnnnnnnnnnnnnnnnnnnnnnnnnnnnnnnnnnnnnnnnnnnnnnnnnnnnnnnnnnnnnnnnnnnnnnnnnnnnnnnnnnnnnnnnnnnnnnnnnnnnnnnnnnnnnnnnnnnnnnnnnnnnnnnnnnnnnnnnnnnnnnnnnnnnnnnnnnnnnnnnnnnnnnnnnnnnnnnnnnnnnnnnnnnnnnnnnnnnnnnnnnnnnnnnnnnnnnnnnnnnnnnnnnnnnnnnnnnnnnnnnnnnnnnnnnnnnnnnnnnnnnnnnnnnnnnnnnnnnnnnnnnnnnnnnnnnnnnnnnnnnnnnnnnnnnnnnnnnnnnnnnnnnnnnnnnnnnnnnnnnnnnnnnnnnnnnnnnnnnnnnnnnnnnnnnnnnnnnnnnnnnnnnnnnnnnnnnnnnnnnnnnnnnnnnnnnnnnnnnnnnnnnnnnnnnnnnnnnnnnnnnnnnnnnnnnnnnnnnnnnnnnnnnnnnnnnnnnnnnnnnnnnnnnnnnnnnnnnnnnnnnnnnnnnnnnnnnnnnnnnnnnnnnnnnnnnnnnnnnnnnnnnnnnnnnnnnnnnnnnnnnnnnnnnnnnnnnnnnnnnnnnnnnnnnnnnnnnnnnnnnnnnnnnnnnnnnnnnnnnnnnnnnnnnnnnnnnnnnnnnnnnnnnnnnnnnnnnnnnnnnnnnnnnnnnnnnnnnnnnnnnnnnnnnnnnnnnnnnnnnnnnnnnnnnnnnnnnnnnnnnnnnnnnnnnnnnnnnnnnnnnnnnnnnnnnnnnnnnnnnnnnnnnnnnnnnnnnnnnnnnnnnnnnnnnnnnnnnnnnnnnnnnnnnnnnnnnnnnnnnnnnnnnnnnnnnnnnnnnnnnnnnnnnnnnnnnnnnnnnnnnnnnnnnnnnnnnnnnnnnnnnnnnnnnnnnnnnnnnnnnnnnnnnnnnnnnnnnnnnnnnnnnnnnnnnnnnnnnnnnnnnnnnnnnnnnnnnnnnnnnnnnnnnnnnnnnnnnnnnnnnnnnnnnnnnnnnnnnnnnnnnnnnnnnnnnnnnnnnnnnnnnnnnnnnnnnnnnnnnnnnnnnnnnnnnnnnnnnnnnnnnnnnnnnnnnnnnnnnnnnnnnnnnnnnnnnnnnnnnnnnnnnnnnnnnnnnnnnnnnnnnnnnnnnnnnnnnnnnnnnnnnnnnnnnnnnnnnnnnnnnnnnnnnnnnnnnnnnnnnnnnnnnnnnnnnnnnnnnnnnnnnnnnnnnnnnnnnnnnnnnnnnnnnnnnnnnnnnnnnnnnnnnnnnnnnnnnnnnnnnnnnnnnnnnnnnnnnnnnnnnnnnnnnnnnnnnnnnnnnnnnnnnnnnnnnnnnnnnnnnnnnnnnnnnnnnnnnnnnnnnnnnnnnnnnnnnnnnnnnnnnnnnnnnnnnnnnnnnnnnnnnnnnnnnnnnnnnnnnnnnnnnnnnnnnnnnnnnnnnnnnnnnnnnnnnnnnnnnnnnnnnnnnnnnnnnnnnnnnnnnnnnnnnnnnnnnnnnnnnnnnnnnnnnnnnnnnnnnnnnnnnnnnnnnnnnnnnnnnnnnnnnnnnnnnnnnnnnnnnnnnnnnnnnnnnnnnnnnnnnnnnnnnnnnnnnnnnnnnnnnnnnnnnnnnnnnnnnnnnnnnnnnnnnnnnnnnnnnnnnnnnnnnnnnnnnnnnnnnnnnnnnnnnnnnnnnnnnnnnnnnnnnnnnnnnnnnnnnnnnnnnnnnnnnnnnnnnnnnnnnnnnnnnnnnnnnnnnnnnnnnnnnnnnnnnnnnnnnnnnnnnnnnnnnnnnnnnnnnnnnnnnnnnnnnnnnnnnnnnnnnnnnnnnnnnnnnnnnnnnnnnnnnnnnnnnnnnnnnnnnnnnnnnnnnnnnnnnnnnnnnnnnnnnnnnnnnnnnnnnnnnnnnnnnnnnnnnnnnnnnnnnnnnnnnnnnnnnnnnnnnnnnnnnnnnnnnnnnnnnnnnnnnnnnnnnnnnnnnnnnnnnnnnnnnnnnnnnnnnnnnnnnnnnnnnnnnnnnnnnnnnnnnnnnnnnnnnnnnnnnnnnnnnnnnnnnnnnnnnnnnnnnnnnnnnnnnnnnnnnnnnnnnnnnnnnnnnnnnnnnnnnnnnnnnnnnnnnnnnnnnnnnnnnnnnnnnnnnnnnnnnnnnnnnnnnnnnnnnnnnnnnnnnnnnnnnnnnnnnnnnnnnnnnnnnnnnnnnnnnnnnnnnnnnnnnnnnnnnnnnnnnnnnnnnnnnnnnnnnnnnnnnnnnnnnnnnnnnnnnnnnnnnnnnnnnnnnnnnnnnnnnnnnnnnnnnnnnnnnnnnnnnnnnnnnnnnnnnnnnnnnnnnnnnnnnnnnnnnnnnnnnnnnnnnnnnnnnnnnnnnnnnnnnnnnnnnnnnnnnnnnnnnnnnnnnnnnnnnnnnnnnnnnnnnnnnnnnnnnnnnnnnnnnnnnnnnnnnnnnnnnnnnnnnnnnnnnnnnnnnnnnnnnnnnnnnnnnnnnnnnnnnnnnnnnnnnnnnnnnnnnnnnnnnnnnnnnnnnnnnnnnnnnnnnnnnnnnnnnnnnnnnnnnnnnnnnnnnnnnnnnnnnnnnnnnnnnnnnnnnnnnnnnnnnnnnnnnnnnnnnnnnnnnnnnnnttcggtgattctctgaacatcctgcaggaccgcttcgcgcacgcgcagtttcaagcggcggctacggacaattgttgcctccaccatatcctgatccccctccttccgcccgaaggtatcgccctggtgaagggaattccggttcgttgggcgctcgcgcaaaatgaggattacttaccggagccccttccgaccatgatgatacccggcaagaagcacgtgctgcgtaactaatgtaccactacggacaaccggagtcaagagagatttgaaaatgacaacccccgatgcaatccgcagaccgaaaccacggattttcacggattatcacggattttgaacccggaactcggaacgcagaacccggaacggtctttaaccacggattaacacggattttgaacccggaactcggaacgcagaacccggaacggtctttaaccacggattcacacggattgcactgattctcaggactctatactttgaactttgaaccttgaactttgaaccctgagcctgaacccggaactcggaacgcagaacccggaacggtctttaaccacggattcacacggattaccacggattacacgaacgaaatgcctctttgggccgtaaactgtgaaccgtaaactctcttgctaaccgcagaggggtcgcagacccaggggcgcagggccgcagagggaatgcaattccccttcgtccccctttcctaaagggggggagaggggattatgccatttccccgttgctcattttttctcctttactctcaacagttttgtggtataatggcgtttgctatcttattaccacagtagaatcggcacgccgctcccacttcttgaaaggactgccccatgtccttttatgcgcatactccgaatcgcgtcggtgcgtgtgctcccccatctcgccagagaccattcagttaaccgcagagggcgcagaggtgtgcagagggagcttgactttgttgcctgaaagtagtaatttacagccaacaggagcaaagtgaactgtttttatcgcaggcgttacaaaagattggggcgaatgtatgaactacaacctgcttgaagaggaatggattccggttttgtggcgggacggcaaggtgagtcgcgtgggcattcgggaggcgcttacggaggcggggcgcatccggcagattgcggcaagcaatcctatggaccgcgtggcgctcctgcgctttctgttggctgtgctcatgtggtgcaaagaggacgcgaagtcttcactcgcggccttggacgagaagagcgccgacataccggagaactggctggctaaactgaaggaaaacaaggccgcgttcaatctgctgggcgacggtaagaggttctatcaggacgaattgttgaagggcaaggaatctcggaccatcggcgatctgctcgtcgagttccctggagcggattcggtgaatcacatgcggcacgttgtgcatgacagttcctacgggttttgcccggcgtgttgcgcgatgggaatcttgcggctctcggtctgggctccggccaacaggttttatcccgcatcagtcaacccgtgctctgcggcctacgcatttactgaagggaagaatctgttccagaccctttgcgcgaatcttccagaaacaaatccgcaagctgatcaggctccatggttgggcaacgagcagccgaattcacctgacgcagtagccaggcttgcctggcggccccgcaagttgtggctgaacatggcagagaacggtggtttttgtgcgtactgcgggcaaaccggaacgttggtcaagagcctatgtattgagaaggggtggcccactcctgtcaccacgggccagcaatttggcaagaatgtcttatccgagttccaaaaactcaacagcgattacaaggcgaagacgaccgacaggcgcaaggtggccgacaaggtcgtcagggttgcccctgtcatccacaagtgcaggatgctggcgctctcgcaagccgattccaatgcggagcaagcgcccgtagacaagagcgatgcagcgaagattgcacgagtcatcgaccaattgtacacggcgggcaaccagaagatcatcaaggagttgaccaagaagcccacgaagaaagagaagcccttgcttgatcagcaggatacgcaggtgaagaagttctgggttgaagaccctcatcttctcaaggaagccgagcccgtcaggctgcccgacctcagcgaggacgttggcctgcacgcctccaagttctggcgcgatgccttgcgtctgcgcggcaccaaggcacttgccattggcatagtcggcgacgggcagtacgtcttccacgacacgcccgctgtgcgtttaccggataccgctgcgactatgttggcgaagcttacaagcgattgcgctgaaatcctacagggcacaggcacgaaggaaaagccaaacgaaaacagcgaggccaaattccggcgtcgcggggtacttaggacagttacatacaaccctgacctgcagcaccccgaaattagcgcatccgtaaagcttctgacgccaaatgccgaggctcagattcgtgaccggctgagccgaatcaatgcctcgacgggcgataacgcaaccgaagacaaggcattcctgcatgaggtatatgcgccggtggtggaacaggttatcgctgccgtaacacctggttcaccgcttcgtcggcatgccacgcggaatcacgcgcaagccctgttgagcaagaagattaaagagctggttgagaagccggatcatctgtcgcacgcaggtacgcctgcagccgcgcctggcgaaccaaaacgtggccgcaagaagggaggctcaaatgagccagaccgctgaatacatcaagaggctttcagagttgcaggaaggcgagcactcgcggctgcgccgtctggccggacggccgctcgacgcaacgctccagggtttcgacgtcttcacgggcctctggtggccactgcgggcgaaaagtccggcgaccccgcgccgggagccgtcatggctcgttgccaagcttttcggcgcgttccgcgtcccgcacatccgaccagattcaggcgcggggccctctttgcctgaagtcctgggccgctgcgaaccgcacgacgaggatggccgcaagcgcttccgagctcgattcgacgctctgctttgctcgtccctgtcgtctctggagccgcatttgcgttgggcgctgggagaggtcgcccgggccgtcgccgggcacgtgccgcatgcgcgggatgtgaagggcatcgactgggtgcaactcctcgacgatctctccatctgggaacggggcgaggagcaccgccgcggacgcgatgttcgcgacatctgggccgaaacgtatctcaacgccactgattcaaaagagaggagagcatagaaatgttgatcgaaatccacatgatccagaatcacagcccttcgaacctgaaccgggacgatcttggcgcgcccaagacctgcatcttcggcggcgtcacccgggcgcgcatctccagccagtgtctcaaacgcagcatccgccgcagcccggagttcgcgggggctttggagagggatggcggcgtgcgtacacgccggctgatcgagctgatcgcaaaggaggcggcgggcaaagacaatccaccgaatgagcaacattgcaaggccattcgaaaggtctttacggacgggggggtcggcctgaaggatgagaacactttcgacatactcttctttctgcctcaatccgccatcaaggaaatgggcgctgccgttggccaaggaaacggcgacctgggcatgaaattctccgagatcatcggcaagtttgtcaagacacccgacatcgcactttgtggccgtatgacggagttcgatgcaaaggggccgtttcagggcctcaaaggccagtttaccgttgaggctgcgctctccgccgctcatgcgatttcgactcacgcggtcgtgaacgaggtggactacttcaccgctgccgacgacgtgcccggccaggacgccggcgcggcccacgtcaacgaggccatgttcaactcggcctgcttctacaaacacttcgtcattgactttgagcagttgaagaagaacctggcggacgatgccgacctcgcccgcaggacggtacggtgcttccttgaagcagccgccaaggccaacccctccggcaaacaacacgcattcgcggcattcaatccgcccgacggagttctggttgaggtcaaaactaagtcggccacgcccgtcagctacaccaacgccttcgccgatccggtgtgggaaaagtccgaacgcggtttgatcggcgaaagcatcgctagacttggccagtacgcccacgatctcgctacaggttacggcatcgaggccgaacgtttctggttctcgccgaatctgcgccatcgtctgacctggatcgacaagagcatgaaggaacacgagcaagaacaatccgtggtcggttccgacgagttcggtgagttcgataagttcgtccataaggtcgtggacaagatgggggcaaccgggacgcctgcggaggcggcgaaatgaccgaagccaacacactcttcctccgccttgaaggccccctccaggcttggggcgacacgtcaaaattcgtcatccggcggaccatggatgcgccgaccaagtccggcatactgggcctgctctgctgcgccatgggcctgtcgcgcaaggcggcgcgggaacgcctgccggagctgaaggggcttgcgatgggtgtgcgcatcgaccggcacggcacgcggtggtgggattaccaaacggtaggagcgggaatcggcatgacaaccgctgggggcggtctgaagaccggagcccagggcacgctcatcacgcgccgggagtacctggccgacgcgagctttctcgtggcgctccagggtggtgatgcgaagttgatccatgatatcgccgcggcgattgcgtcgccgaagtggccagtattccttggccgcaagtcgtgcccgccgagtattccggtcctagccgcgccacgaagcagcgagacatggacgaatcccacagagcacagggacttgctgacagcactggggacaataccgtggtgtccacgctacgaatcggacataccgcgagaccagaacagacgccgccgagaagaggtgacgttgggttgcttgattgaatggcgcgctgtcaatgaatccgacattgctcctgctgaggccgaggtctggtacgatacaccggtctcattcgacccaccggttcatgaggcacggctggttgtccgtgatgaggtaaacgtgaaggtcggtgacgcacttcagcgtgtcgcagatccgcctccgagaccgcgcgccggttactctaccccgcaatggcgtgagaatatcagacctggaagattgaaggacgatggcggtctgtgtgttttctgcaagtctccggccacgaccgtgcagcatgtcacctatcgtcgggctgggggagatgaagacccaaaggatttgcggtcgctctgccggctctgccacgacgcggtgacgatgctcgagtacggtcttgggatgggactagaccggattaacccagaacatgcatgctggcgagaggatattatccgcgcgcgtgatgaaatccgtcggtggcgaagcgaggaaggccgccgccgtgctttgaggggcgcgcccgagcgtgtccgtcgagaactgcttgaagaagatgaggaataggctatgtatcactcccatttgcttatcaatataggtgacaatcccgaccgtccggactggaaaatctgtcgtcgctggttgcgcaatctgtaccgtgtacatcagcggttgtgcctggcgtttccgtcaggcattctgttcagggaacccaacgggggcgatgcaaatcaggcgcgaaacggcgaaaacggctttctctttcgcattgactacccggttgatttcaggcaaggaggtcggaagccgctcatcattattcagtcggcttcagataaagaacctgactgggaccgcgcttttggcttgatgaaagacaaaacgaatgatctgggccatcctatcggggatgccggtttcctgcttgccgcaccgccacagatgaagtccgtctctatagccgttgacggcaacgagctggtcctgaaaggcgggaaggaaaactaccgcatccgtcctggcgagcttgtgcgattccggctccgcgccaatccgacacggaaaattcaagacggctcgtccaatggaaaacgcatgcgtgtcgatccgactttggaagaccatgcccgctgggtagctggcaaacttggaagcgctgctgactctccaatctgtattgagaagtttgttcccggatgggcctatggctggcgaagtaagtacgaacctcagcccggccagcgcatgcagtggtggtctgtgctgtttgaaggaaagtttcgaatgggggatccggtggtactgaaggaacttctcgaaacaggcattggctccgctaaggcattcgggtttgggcttttgtcgattgcgagggtatagcgtatgcgcaaccttcatgaccttccaaagtttgcggaccgctggagctatctgtaccttgagcacggccggctggagaaggaagcaagcgcgctgactttctacaaggctgaaggttcgatagatatcccgatagatcaactcggcgtgcttctgcttggtccgggttcggcggtgacacacgctgcgatgcggtgtctggcagacaataatacactcgtgtgctggacgggtgaagagggcgtgcgcctgtatgcgcacagcacgggtggaacataccattcgacgcgtttgctgcggcaggcggctctttactcgaattatgaagaccgaatcaaggtgattcgacgtatgtatgcgaagcgttttcccgatccgctgccagacaagatttcgcttgacctcgtgcgcgctaaggaagggtatcgcgttcgagaggcgtaccggagggtcgcagaggaagtgggcatcgagtggcacgggcgaaattacaggcaggataattggagccatggggatcctttgaaccgtgcgttgtcttcggcttacgcatgcctctatggcctttgccatgctgcgattctttcggcggggtattcgcctgcaatcggcttcattcatacggggaagttactgtcatttgtgtacgacattgccgacctctacaagactggggtggccgtaccgatagcatttcgagccgtgaaagagagcagcctcgacatcgagcgcagaacaagaatagcttgtcgcaacgtctttcatgagacgaagttgatgcagcgaatcttgcctgatatagcggaggtcttggatgctcgtgatgatcttggagaacgccccggcgagcttgaagggagagctatcacgttggctgatagagccgcggacgggagtcttccttggcaatccgagtgcgagggtgagggatcaactttgggagaaggcggtccagaaaattggtaggggctctgtgcttcagatatggagcgacggccggatcccgcaaggttatcggcatcgcagcgcaggtttgccggaccgcacactcacggatgtggagggcattgggcttgtgctgcgtccggatcgaatctcgaagagtagaaagggaaggacaaggaataaagagaacgcagacgggactgacgcaaaccaaatgttgctgccctttatgtagggatacggggtgtttgacggggcgagattttggtgtgatccccacgcgcgtggggatgaaccgatcgtctatacgaaaagcatatcggcactccagtgatccccacgcgcgtggggatgaaccgactcgactcccatcctcgagttcaagaacggcgtgatccccacgcgcgtggggatgaaccggaaggccaaagaatccactgagcctgtcgctcgtgatccccacgcgcgtggggatgaaccgggcggcggtgctctgttctatacaacgctcacgtgatccccacgcgcgtggggatgaaccgttgcggttcaaagccacattcgccgaggaagagtgatccccacgcgcgtggggatgaaccgcaaggaacatcacgaaataacgcctatggacagtgatccccacgcgcgtggggatgaaccgtgggaggggattaggcccagggccgctctcatgtgatccccacgcgcgtggggatgaaccgccggactcagaatcggcgcgaactctttatgagtgatccccacgcgcgtggggatgaaccgataccccctagaacgcccctatttgtcatcgcgtgatccccacgcgcgtggggatgaaccgagcatgagcgatcccacaaaagaaatgatagcgtgatccccacgcgcgtggggatgaaccggtcaacaaacactttcctcttgtcccaaaatccgtgtttatccgtgtaaatccgtggttccatggttttgttgtttttgttcttttggttgcggttttgctgcgccatgtaaatccgtggtgaaaatccagtctctcgtttcttgcttcgtgtttcgggttggagaatccgtgtaatccgtgaaatccgtggtttctctctattcgtgttccagagttttggttgcattggtatcgttctgttataattctttggcagtttccgcaggggatttgtacggaaagagcgaaagtagaggttcagtggagcagcaaatttctatgcacgaggagatcgaagcgctctatgcgaggctgaatgacttgttccggagcgaccgcgagcggttggaggcggacatcagggagttcgagcgcagggctgccgaaagccacttgttgtatggtggcaagccgctcggggtggcattttttccgtttatactgacggaggcgcaggttcagtatatcgggcgggtggtcgaaggcctgatgcaactgatggagaaggtgacgcgcctgtttctcgatgagcctgccgtcaagcggttctatgatttccggccggagcagctcgaccttatcgagacggacccgggctatgagcgcgcgattccgtgctcgcggtttgactcgtttttctacggcaacacgcttcaattttccgaactgaacaccgacggcgccgccggaatggacggggcggaaaaggtcgcgaaactgttcttgtcggcgccgagcatgcgcgagtttttttctccgcatcgggtgaagacgtttgatataagcgagcgcgtgctcgaggtgttgctcgattgctaccgcgagtttgccggttcggcggcctcgcgaacgccgcgcatagcgattgtggactggaaagaggtgcgcacatctgaggagtttgtcgggttcgcagagttctgccgtgagcgggggtatgaggcggtcgtggcggacccgcgcgagctcgagtatgacgggcgcgttctatcgcatcgcggtctcccgattgacataatctatagaagagtcgtctcgcgggaatacgtcgagcggctggcggaggtgacggctatgacgcgcgcattcaaagaccataatgtatgtgtggtgggctcgttccggtcggatatcggttttaacaagaagacgtttgcgctgttgcacgagccggagttcgcccgcttctttacggaggatgagcgcagcctgattgcggagcatatcccgtggacgcacaagtttggagacaaggagtgcgaatttcgcggac

SEQ ID NO: 1063 - DNA, 104060 bp, Artificial Sequence
  Synthetic Oligonucleotide
  misc_feature (1)..(94400): n is a, c, g, or t
nnnnnnnnnnnnnnnnnnnnnnnnnnnnnnnnnnnnnnnnnnnnnnnnnnnnnnnnnnnnnnnnnnnnnnnnnnnnnnnnnnnnnnnnnnnnnnnnnnnnnnnnnnnnnnnnnnnnnnnnnnnnnnnnnnnnnnnnnnnnnnnnnnnnnnnnnnnnnnnnnnnnnnnnnnnnnnnnnnnnnnnnnnnnnnnnnnnnnnnnnnnnnnnnnnnnnnnnnnnnnnnnnnnnnnnnnnnnnnnnnnnnnnnnnnnnnnnnnnnnnnnnnnnnnnnnnnnnnnnnnnnnnnnnnnnnnnnnnnnnnnnnnnnnnnnnnnnnnnnnnnnnnnnnnnnnnnnnnnnnnnnnnnnnnnnnnnnnnnnnnnnnnnnnnnnnnnnnnnnnnnnnnnnnnnnnnnnnnnnnnnnnnnnnnnnnnnnnnnnnnnnnnnnnnnnnnnnnnnnnnnnnnnnnnnnnnnnnnnnnnnnnnnnnnnnnnnnnnnnnnnnnnnnnnnnnnnnnnnnnnnnnnnnnnnnnnnnnnnnnnnnnnnnnnnnnnnnnnnnnnnnnnnnnnnnnnnnnnnnnnnnnnnnnnnnnnnnnnnnnnnnnnnnnnnnnnnnnnnnnnnnnnnnnnnnnnnnnnnnnnnnnnnnnnnnnnnnnnnnnnnnnnnnnnnnnnnnnnnnnnnnnnnnnnnnnnnnnnnnnnnnnnnnnnnnnnnnnnnnnnnnnnnnnnnnnnnnnnnnnnnnnnnnnnnnnnnnnnnnnnnnnnnnnnnnnnnnnnnnnnnnnnnnnnnnnnnnnnnnnnnnnnnnnnnnnnnnnnnnnnnnnnnnnnnnnnnnnnnnnnnnnnnnnnnnnnnnnnnnnnnnnnnnnnnnnnnnnnnnnnnnnnnnnnnnnnnnnnnnnnnnnnnnnnnnnnnnnnnnnnnnnnnnnnnnnnnnnnnnnnnnnnnnnnnnnnnnnnnnnnnnnnnnnnnnnnnnnnnnnnnnnnnnnnnnnnnnnnnnnnnnnnnnnnnnnnnnnnnnnnnnnnnnnnnnnnnnnnnnnnnnnnnnnnnnnnnnnnnnnnnnnnnnnnnnnnnnnnnnnnnnnnnnnnnnnnnnnnnnnnnnnnnnnnnnnnnnnnnnnnnnnnnnnnnnnnnnnnnnnnnnnnnnnnnnnnnnnnnnnnnnnnnnnnnnnnnnnnnnnnnnnnnnnnnnnnnnnnnnnnnnnnnnnnnnnnnnnnnnnnnnnnnnnnnnnnnnnnnnnnnnnnnnnnnnnnnnnnnnnnnnnnnnnnnnnnnnnnnnnnnnnnnnnnnnnnnnnnnnnnnnnnnnnnnnnnnnnnnnnnnnnnnnnnnnnnnnnnnnnnnnnnnnnnnnnnnnnnnnnnnnnnnnnnnnnnnnnnnnnnnnnnnnnnnnnnnnnnnnnnnnnnnnnnnnnnnnnnnnnnnnnnnnnnnnnnnnnnnnnnnnnnnnnnnnnnnnnnnnnnnnnnnnnnnnnnnnnnnnnnnnnnnnnnnnnnnnnnnnnnnnnnnnnnnnnnnnnnnnnnnnnnnnnnnnnnnnnnnnnnnnnnnnnnnnnnnnnnnnnnnnnnnnnnnnnnnnnnnnnnnnnnnnnnnnnnnnnnnnnnnnnnnnnnnnnnnnnnnnnnnnnnnnnnnnnnnnnnnnnnnnnnnnnnnnnnnnnnnnnnnnnnnnnnnnnnnnnnnnnnnnnnnnnnnnnnnnnnnnnnnnnnnnnnnnnnnnnnnnnnnnnnnnnnnnnnnnnnnnnnnnnnnnnnnnnnnnnnnnnnnnnnnnnnnnnnnnnnnnnnnnnnnnnnnnnnnnnnnnnnnnnnnnnnnnnnnnnnnnnnnnnnnnnnnnnnnnnnnnnnnnnnnnnnnnnnnnnnnnnnnnnnnnnnnnnnnnnnnnnnnnnnnnnnnnnnnnnnnnnnnnnnnnnnnnnnnnnnnnnnnnnnnnnnnnnnnnnnnnnnnnnnnnnnnnnnnnnnnnnnnnnnnnnnnnnnnnnnnnnnnnnnnnnnnnnnnnnnnnnnnnnnnnnnnnnnnnnnnnnnnnnnnnnnnnnnnnnnnnnnnnnnnnnnnnnnnnnnnnnnnnnnnnnnnnnnnnnnnnnnnnnnnnnnnnnnnnnnnnnnnnnnnnnnnnnnnnnnnnnnnnnnnnnnnnnnnnnnnnnnnnnnnnnnnnnnnnnnnnnnnnnnnnnnnnnnnnnnnnnnnnnnnnnnnnnnnnnnnnnnnnnnnnnnnnnnnnnnnnnnnnnnnnnnnnnnnnnnnnnnnnnnnnnnnnnnnnnnnnnnnnnnnnnnnnnnnnnnnnnnnnnnnnnnnnnnnnnnnnnnnnnnnnnnnnnnnnnnnnnnnnnnnnnnnnnnnnnnnnnnnnnnnnnnnnnnnnnnnnnnnnnnnnnnnnnnnnnnnnnnnnnnnnnnnnnnnnnnnnnnnnnnnnnnnnnnnnnnnnnnnnnnnnnnnnnnnnnnnnnnnnnnnnnnnnnnnnnnnnnnnnnnnnnnnnnnnnnnnnnnnnnnnnnnnnnnnnnnnnnnnnnnnnnnnnnnnnnnnnnnnnnnnnnnnnnnnnnnnnnnnnnnnnnnnnnnnnnnnnnnnnnnnnnnnnnnnnnnnnnnnnnnnnnnnnnnnnnnnnnnnnnnnnnnnnnnnnnnnnnnnnnnnnnnnnnnnnnnnnnnnnnnnnnnnnnnnnnnnnnnnnnnnnnnnnnnnnnnnnnnnnnnnnnnnnnnnnnnnnnnnnnnnnnnnnnnnnnnnnnnnnnnnnnnnnnnnnnnnnnnnnnnnnnnnnnnnnnnnnnnnnnnnnnnnnnnnnnnnnnnnnnnnnnnnnnnnnnnnnnnnnnnnnnnnnnnnnnnnnnnnnnnnnnnnnnnnnnnnnnnnnnnnnnnnnnnnnnnnnnnnnnnnnnnnnnnnnnnnnnnnnnnnnnnnnnnnnnnnnnnnnnnnnnnnnnnnnnnnnnnnnnnnnnnnnnnnnnnnnnnnnnnnnnnnnnnnnnnnnnnnnnnnnnnnnnnnnnnnnnnnnnnnnnnnnnnnnnnnnnnnnnnnnnnnnnnnnnnnnnnnnnnnnnnnnnnnnnnnnnnnnnnnnnnnnnnnnnnnnnnnnnnnnnnnnnnnnnnnnnnnnnnnnnnnnnnnnnnnnnnnnnnnnnnnnnnnnnnnnnnnnnnnnnnnnnnnnnnnnnnnnnnnnnnnnnnnnnnnnnnnnnnnnnnnnnnnnnnnnnnnnnnnnnnnnnnnnnnnnnnnnnnnnnnnnnnnnnnnnnnnnnnnnnnnnnnnnnnnnnnnnnnnnnnnnnnnnnnnnnnnnnnnnnnnnnnnnnnnnnnnnnnnnnnnnnnnnnnnnnnnnnnnnnnnnnnnnnnnnnnnnnnnnnnnnnnnnnnnnnnnnnnnnnnnnnnnnnnnnnnnnnnnnnnnnnnnnnnnnnnnnnnnnnnnnnnnnnnnnnnnnnnnnnnnnnnnnnnnnnnnnnnnnnnnnnnnnnnnnnnnnnnnnnnnnnnnnnnnnnnnnnnnnnnnnnnnnnnnnnnnnnnnnnnnnnnnnnnnnnnnnnnnnnnnnnnnnnnnnnnnnnnnnnnnnnnnnnnnnnnnnnnnnnnnnnnnnnnnnnnnnnnnnnnnnnnnnnnnnnnnnnnnnnnnnnnnnnnnnnnnnnnnnnnnnnnnnnnnnnnnnnnnnnnnnnnnnnnnnnnnnnnnnnnnnnnnnnnnnnnnnnnnnnnnnnnnnnnnnnnnnnnnnnnnnnnnnnnnnnnnnnnnnnnnnnnnnnnnnnnnnnnnnnnnnnnnnnnnnnnnnnnnnnnnnnnnnnnnnnnnnnnnnnnnnnnnnnnnnnnnnnnnnnnnnnnnnnnnnnnnnnnnnnnnnnnnnnnnnnnnnnnnnnnnnnnnnnnnnnnnnnnnnnnnnnnnnnnnnnnnnnnnnnnnnnnnnnnnnnnnnnnnnnnnnnnnnnnnnnnnnnnnnnnnnnnnnnnnnnnnnnnnnnnnnnnnnnnnnnnnnnnnnnnnnnnnnnnnnnnnnnnnnnnnnnnnnnnnnnnnnnnnnnnnnnnnnnnnnnnnnnnnnnnnnnnnnnnnnnnnnnnnnnnnnnnnnnnnnnnnnnnnnnnnnnnnnnnnnnnnnnnnnnnnnnnnnnnnnnnnnnnnnnnnnnnnnnnnnnnnnnnnnnnnnnnnnnnnnnnnnnnnnnnnnnnnnnnnnnnnnnnnnnnnnnnnnnnnnnnnnnnnnnnnnnnnnnnnnnnnnnnnnnnnnnnnnnnnnnnnnnnnnnnnnnnnnnnnnnnnnnnnnnnnnnnnnnnnnnnnnnnnnnnnnnnnnnnnnnnnnnnnnnnnnnnnnnnnnnnnnnnnnnnnnnnnnnnnnnnnnnnnnnnnnnnnnnnnnnnnnnnnnnnnnnnnnnnnnnnnnnnnnnnnnnnnnnnnnnnnnnnnnnnnnnnnnnnnnnnnnnnnnnnnnnnnnnnnnnnnnnnnnnnnnnnnnnnnnnnnnnnnnnnnnnnnnnnnnnnnnnnnnnnnnnnnnnnnnnnnnnnnnnnnnnnnnnnnnnnnnnnnnnnnnnnnnnnnnnnnnnnnnnnnnnnnnnnnnnnnnnnnnnnnnnnnnnnnnnnnnnnnnnnnnnnnnnnnnnnnnnnnnnnnnnnnnnnnnnnnnnnnnnnnnnnnnnnnnnnnnnnnnnnnnnnnnnnnnnnnnnnnnnnnnnnnnnnnnnnnnnnnnnnnnnnnnnnnnnnnnnnnnnnnnnnnnnnnnnnnnnnnnnnnnnnnnnnnnnnnnnnnnnnnnnnnnnnnnnnnnnnnnnnnnnnnnnnnnnnnnnnnnnnnnnnnnnnnnnnnnnnnnnnnnnnnnnnnnnnnnnnnnnnnnnnnnnnnnnnnnnnnnnnnnnnnnnnnnnnnnnnnnnnnnnnnnnnnnnnnnnnnnnnnnnnnnnnnnnnnnnnnnnnnnnnnnnnnnnnnnnnnnnnnnnnnnnnnnnnnnnnnnnnnnnnnnnnnnnnnnnnnnnnnnnnnnnnnnnnnnnnnnnnnnnnnnnnnnnnnnnnnnnnnnnnnnnnnnnnnnnnnnnnnnnnnnnnnnnnnnnnnnnnnnnnnnnnnnnnnnnnnnnnnnnnnnnnnnnnnnnnnnnnnnnnnnnnnnnnnnnnnnnnnnnnnnnnnnnnnnnnnnnnnnnnnnnnnnnnnnnnnnnnnnnnnnnnnnnnnnnnnnnnnnnnnnnnnnnnnnnnnnnnnnnnnnnnnnnnnnnnnnnnnnnnnnnnnnnnnnnnnnnnnnnnnnnnnnnnnnnnnnnnnnnnnnnnnnnnnnnnnnnnnnnnnnnnnnnnnnnnnnnnnnnnnnnnnnnnnnnnnnnnnnnnnnnnnnnnnnnnnnnnnnnnnnnnnnnnnnnnnnnnnnnnnnnnnnnnnnnnnnnnnnnnnnnnnnnnnnnnnnnnnnnnnnnnnnnnnnnnnnnnnnnnnnnnnnnnnnnnnnnnnnnnnnnnnnnnnnnnnnnnnnnnnnnnnnnnnnnnnnnnnnnnnnnnnnnnnnnnnnnnnnnnnnnnnnnnnnnnnnnnnnnnnnnnnnnnnnnnnnnnnnnnnnnnnnnnnnnnnnnnnnnnnnnnnnnnnnnnnnnnnnnnnnnnnnnnnnnnnnnnnnnnnnnnnnnnnnnnnnnnnnnnnnnnnnnnnnnnnnnnnnnnnnnnnnnnnnnnnnnnnnnnnnnnnnnnnnnnnnnnnnnnnnnnnnnnnnnnnnnnnnnnnnnnnnnnnnnnnnnnnnnnnnnnnnnnnnnnnnnnnnnnnnnnnnnnnnnnnnnnnnnnnnnnnnnnnnnnnnnnnnnnnnnnnnnnnnnnnnnnnnnnnnnnnnnnnnnnnnnnnnnnnnnnnnnnnnnnnnnnnnnnnnnnnnnnnnnnnnnnnnnnnnnnnnnnnnnnnnnnnnnnnnnnnnnnnnnnnnnnnnnnnnnnnnnnnnnnnnnnnnnnnnnnnnnnnnnnnnnnnnnnnnnnnnnnnnnnnnnnnnnnnnnnnnnnnnnnnnnnnnnnnnnnnnnnnnnnnnnnnnnnnnnnnnnnnnnnnnnnnnnnnnnnnnnnnnnnnnnnnnnnnnnnnnnnnnnnnnnnnnnnnnnnnnnnnnnnnnnnnnnnnnnnnnnnnnnnnnnnnnnnnnnnnnnnnnnnnnnnnnnnnnnnnnnnnnnnnnnnnnnnnnnnnnnnnnnnnnnnnnnnnnnnnnnnnnnnnnnnnnnnnnnnnnnnnnnnnnnnnnnnnnnnnnnnnnnnnnnnnnnnnnnnnnnnnnnnnnnnnnnnnnnnnnnnnnnnnnnnnnnnnnnnnnnnnnnnnnnnnnnnnnnnnnnnnnnnnnnnnnnnnnnnnnnnnnnnnnnnnnnnnnnnnnnnnnnnnnnnnnnnnnnnnnnnnnnnnnnnnnnnnnnnnnnnnnnnnnnnnnnnnnnnnnnnnnnnnnnnnnnnnnnnnnnnnnnnnnnnnnnnnnnnnnnnnnnnnnnnnnnnnnnnnnnnnnnnnnnnnnnnnnnnnnnnnnnnnnnnnnnnnnnnnnnnnnnnnnnnnnnnnnnnnnnnnnnnnnnnnnnnnnnnnnnnnnnnnnnnnnnnnnnnnnnnnnnnnnnnnnnnnnnnnnnnnnnnnnnnnnnnnnnnnnnnnnnnnnnnnnnnnnnnnnnnnnnnnnnnnnnnnnnnnnnnnnnnnnnnnnnnnnnnnnnnnnnnnnnnnnnnnnnnnnnnnnnnnnnnnnnnnnnnnnnnnnnnnnnnnnnnnnnnnnnnnnnnnnnnnnnnnnnnnnnnnnnnnnnnnnnnnnnnnnnnnnnnnnnnnnnnnnnnnnnnnnnnnnnnnnnnnnnnnnnnnnnnnnnnnnnnnnnnnnnnnnnnnnnnnnnnnnnnnnnnnnnnnnnnnnnnnnnnnnnnnnnnnnnnnnnnnnnnnnnnnnnnnnnnnnnnnnnnnnnnnnnnnnnnnnnnnnnnnnnnnnnnnnnnnnnnnnnnnnnnnnnnnnnnnnnnnnnnnnnnnnnnnnnnnnnnnnnnnnnnnnnnnnnnnnnnnnnnnnnnnnnnnnnnnnnnnnnnnnnnnnnnnnnnnnnnnnnnnnnnnnnnnnnnnnnnnnnnnnnnnnnnnnnnnnnnnnnnnnnnnnnnnnnnnnnnnnnnnnnnnnnnnnnnnnnnnnnnnnnnnnnnnnnnnnnnnnnnnnnnnnnnnnnnnnnnnnnnnnnnnnnnnnnnnnnnnnnnnnnnnnnnnnnnnnnnnnnnnnnnnnnnnnnnnnnnnnnnnnnnnnnnnnnnnnnnnnnnnnnnnnnnnnnnnnnnnnnnnnnnnnnnnnnnnnnnnnnnnnnnnnnnnnnnnnnnnnnnnnnnnnnnnnnnnnnnnnnnnnnnnnnnnnnnnnnnnnnnnnnnnnnnnnnnnnnnnnnnnnnnnnnnnnnnnnnnnnnnnnnnnnnnnnnnnnnnnnnnnnnnnnnnnnnnnnnnnnnnnnnnnnnnnnnnnnnnnnnnnnnnnnnnnnnnnnnnnnnnnnnnnnnnnnnnnnnnnnnnnnnnnnnnnnnnnnnnnnnnnnnnnnnnnnnnnnnnnnnnnnnnnnnnnnnnnnnnnnnnnnnnnnnnnnnnnnnnnnnnnnnnnnnnnnnnnnnnnnnnnnnnnnnnnnnnnnnnnnnnnnnnnnnnnnnnnnnnnnnnnnnnnnnnnnnnnnnnnnnnnnnnnnnnnnnnnnnnnnnnnnnnnnnnnnnnnnnnnnnnnnnnnnnnnnnnnnnnnnnnnnnnnnnnnnnnnnnnnnnnnnnnnnnnnnnnnnnnnnnnnnnnnnnnnnnnnnnnnnnnnnnnnnnnnnnnnnnnnnnnnnnnnnnnnnnnnnnnnnnnnnnnnnnnnnnnnnnnnnnnnnnnnnnnnnnnnnnnnnnnnnnnnnnnnnnnnnnnnnnnnnnnnnnnnnnnnnnnnnnnnnnnnnnnnnnnnnnnnnnnnnnnnnnnnnnnnnnnnnnnnnnnnnnnnnnnnnnnnnnnnnnnnnnnnnnnnnnnnnnnnnnnnnnnnnnnnnnnnnnnnnnnnnnnnnnnnnnnnnnnnnnnnnnnnnnnnnnnnnnnnnnnnnnnnnnnnnnnnnnnnnnnnnnnnnnnnnnnnnnnnnnnnnnnnnnnnnnnnnnnnnnnnnnnnnnnnnnnnnnnnnnnnnnnnnnnnnnnnnnnnnnnnnnnnnnnnnnnnnnnnnnnnnnnnnnnnnnnnnnnnnnnnnnnnnnnnnnnnnnnnnnnnnnnnnnnnnnnnnnnnnnnnnnnnnnnnnnnnnnnnnnnnnnnnnnnnnnnnnnnnnnnnnnnnnnnnnnnnnnnnnnnnnnnnnnnnnnnnnnnnnnnnnnnnnnnnnnnnnnnnnnnnnnnnnnnnnnnnnnnnnnnnnnnnnnnnnnnnnnnnnnnnnnnnnnnnnnnnnnnnnnnnnnnnnnnnnnnnnnnnnnnnnnnnnnnnnnnnnnnnnnnnnnnnnnnnnnnnnnnnnnnnnnnnnnnnnnnnnnnnnnnnnnnnnnnnnnnnnnnnnnnnnnnnnnnnnnnnnnnnnnnnnnnnnnnnnnnnnnnnnnnnnnnnnnnnnnnnnnnnnnnnnnnnnnnnnnnnnnnnnnnnnnnnnnnnnnnnnnnnnnnnnnnnnnnnnnnnnnnnnnnnnnnnnnnnnnnnnnnnnnnnnnnnnnnnnnnnnnnnnnnnnnnnnnnnnnnnnnnnnnnnnnnnnnnnnnnnnnnnnnnnnnnnnnnnnnnnnnnnnnnnnnnnnnnnnnnnnnnnnnnnnnnnnnnnnnnnnnnnnnnnnnnnnnnnnnnnnnnnnnnnnnnnnnnnnnnnnnnnnnnnnnnnnnnnnnnnnnnnnnnnnnnnnnnnnnnnnnnnnnnnnnnnnnnnnnnnnnnnnnnnnnnnnnnnnnnnnnnnnnnnnnnnnnnnnnnnnnnnnnnnnnnnnnnnnnnnnnnnnnnnnnnnnnnnnnnnnnnnnnnnnnnnnnnnnnnnnnnnnnnnnnnnnnnnnnnnnnnnnnnnnnnnnnnnnnnnnnnnnnnnnnnnnnnnnnnnnnnnnnnnnnnnnnnnnnnnnnnnnnnnnnnnnnnnnnnnnnnnnnnnnnnnnnnnnnnnnnnnnnnnnnnnnnnnnnnnnnnnnnnnnnnnnnnnnnnnnnnnnnnnnnnnnnnnnnnnnnnnnnnnnnnnnnnnnnnnnnnnnnnnnnnnnnnnnnnnnnnnnnnnnnnnnnnnnnnnnnnnnnnnnnnnnnnnnnnnnnnnnnnnnnnnnnnnnnnnnnnnnnnnnnnnnnnnnnnnnnnnnnnnnnnnnnnnnnnnnnnnnnnnnnnnnnnnnnnnnnnnnnnnnnnnnnnnnnnnnnnnnnnnnnnnnnnnnnnnnnnnnnnnnnnnnnnnnnnnnnnnnnnnnnnnnnnnnnnnnnnnnnnnnnnnnnnnnnnnnnnnnnnnnnnnnnnnnnnnnnnnnnnnnnnnnnnnnnnnnnnnnnnnnnnnnnnnnnnnnnnnnnnnnnnnnnnnnnnnnnnnnnnnnnnnnnnnnnnnnnnnnnnnnnnnnnnnnnnnnnnnnnnnnnnnnnnnnnnnnnnnnnnnnnnnnnnnnnnnnnnnnnnnnnnnnnnnnnnnnnnnnnnnnnnnnnnnnnnnnnnnnnnnnnnnnnnnnnnnnnnnnnnnnnnnnnnnnnnnnnnnnnnnnnnnnnnnnnnnnnnnnnnnnnnnnnnnnnnnnnnnnnnnnnnnnnnnnnnnnnnnnnnnnnnnnnnnnnnnnnnnnnnnnnnnnnnnnnnnnnnnnnnnnnnnnnnnnnnnnnnnnnnnnnnnnnnnnnnnnnnnnnnnnnnnnnnnnnnnnnnnnnnnnnnnnnnnnnnnnnnnnnnnnnnnnnnnnnnnnnnnnnnnnnnnnnnnnnnnnnnnnnnnnnnnnnnnnnnnnnnnnnnnnnnnnnnnnnnnnnnnnnnnnnnnnnnnnnnnnnnnnnnnnnnnnnnnnnnnnnnnnnnnnnnnnnnnnnnnnnnnnnnnnnnnnnnnnnnnnnnnnnnnnnnnnnnnnnnnnnnnnnnnnnnnnnnnnnnnnnnnnnnnnnnnnnnnnnnnnnnnnnnnnnnnnnnnnnnnnnnnnnnnnnnnnnnnnnnnnnnnnnnnnnnnnnnnnnnnnnnnnnnnnnnnnnnnnnnnnnnnnnnnnnnnnnnnnnnnnnnnnnnnnnnnnnnnnnnnnnnnnnnnnnnnnnnnnnnnnnnnnnnnnnnnnnnnnnnnnnnnnnnnnnnnnnnnnnnnnnnnnnnnnnnnnnnnnnnnnnnnnnnnnnnnnnnnnnnnnnnnnnnnnnnnnnnnnnnnnnnnnnnnnnnnnnnnnnnnnnnnnnnnnnnnnnnnnnnnnnnnnnnnnnnnnnnnnnnnnnnnnnnnnnnnnnnnnnnnnnnnnnnnnnnnnnnnnnnnnnnnnnnnnnnnnnnnnnnnnnnnnnnnnnnnnnnnnnnnnnnnnnnnnnnnnnnnnnnnnnnnnnnnnnnnnnnnnnnnnnnnnnnnnnnnnnnnnnnnnnnnnnnnnnnnnnnnnnnnnnnnnnnnnnnnnnnnnnnnnnnnnnnnnnnnnnnnnnnnnnnnnnnnnnnnnnnnnnnnnnnnnnnnnnnnnnnnnnnnnnnnnnnnnnnnnnnnnnnnnnnnnnnnnnnnnnnnnnnnnnnnnnnnnnnnnnnnnnnnnnnnnnnnnnnnnnnnnnnnnnnnnnnnnnnnnnnnnnnnnnnnnnnnnnnnnnnnnnnnnnnnnnnnnnnnnnnnnnnnnnnnnnnnnnnnnnnnnnnnnnnnnnnnnnnnnnnnnnnnnnnnnnnnnnnnnnnnnnnnnnnnnnnnnnnnnnnnnnnnnnnnnnnnnnnnnnnnnnnnnnnnnnnnnnnnnnnnnnnnnnnnnnnnnnnnnnnnnnnnnnnnnnnnnnnnnnnnnnnnnnnnnnnnnnnnnnnnnnnnnnnnnnnnnnnnnnnnnnnnnnnnnnnnnnnnnnnnnnnnnnnnnnnnnnnnnnnnnnnnnnnnnnnnnnnnnnnnnnnnnnnnnnnnnnnnnnnnnnnnnnnnnnnnnnnnnnnnnnnnnnnnnnnnnnnnnnnnnnnnnnnnnnnnnnnnnnnnnnnnnnnnnnnnnnnnnnnnnnnnnnnnnnnnnnnnnnnnnnnnnnnnnnnnnnnnnnnnnnnnnnnnnnnnnnnnnnnnnnnnnnnnnnnnnnnnnnnnnnnnnnnnnnnnnnnnnnnnnnnnnnnnnnnnnnnnnnnnnnnnnnnnnnnnnnnnnnnnnnnnnnnnnnnnnnnnnnnnnnnnnnnnnnnnnnnnnnnnnnnnnnnnnnnnnnnnnnnnnnnnnnnnnnnnnnnnnnnnnnnnnnnnnnnnnnnnnnnnnnnnnnnnnnnnnnnnnnnnnnnnnnnnnnnnnnnnnnnnnnnnnnnnnnnnnnnnnnnnnnnnnnnnnnnnnnnnnnnnnnnnnnnnnnnnnnnnnnnnnnnnnnnnnnnnnnnnnnnnnnnnnnnnnnnnnnnnnnnnnnnnnnnnnnnnnnnnnnnnnnnnnnnnnnnnnnnnnnnnnnnnnnnnnnnnnnnnnnnnnnnnnnnnnnnnnnnnnnnnnnnnnnnnnnnnnnnnnnnnnnnnnnnnnnnnnnnnnnnnnnnnnnnnnnnnnnnnnnnnnnnnnnnnnnnnnnnnnnnnnnnnnnnnnnnnnnnnnnnnnnnnnnnnnnnnnnnnnnnnnnnnnnnnnnnnnnnnnnnnnnnnnnnnnnnnnnnnnnnnnnnnnnnnnnnnnnnnnnnnnnnnnnnnnnnnnnnnnnnnnnnnnnnnnnnnnnnnnnnnnnnnnnnnnnnnnnnnnnnnnnnnnnnnnnnnnnnnnnnnnnnnnnnnnnnnnnnnnnnnnnnnnnnnnnnnnnnnnnnnnnnnnnnnnnnnnnnnnnnnnnnnnnnnnnnnnnnnnnnnnnnnnnnnnnnnnnnnnnnnnnnnnnnnnnnnnnnnnnnnnnnnnnnnnnnnnnnnnnnnnnnnnnnnnnnnnnnnnnnnnnnnnnnnnnnnnnnnnnnnnnnnnnnnnnnnnnnnnnnnnnnnnnnnnnnnnnnnnnnnnnnnnnnnnnnnnnnnnnnnnnnnnnnnnnnnnnnnnnnnnnnnnnnnnnnnnnnnnnnnnnnnnnnnnnnnnnnnnnnnnnnnnnnnnnnnnnnnnnnnnnnnnnnnnnnnnnnnnnnnnnnnnnnnnnnnnnnnnnnnnnnnnnnnnnnnnnnnnnnnnnnnnnnnnnnnnnnnnnnnnnnnnnnnnnnnnnnnnnnnnnnnnnnnnnnnnnnnnnnnnnnnnnnnnnnnnnnnnnnnnnnnnnnnnnnnnnnnnnnnnnnnnnnnnnnnnnnnnnnnnnnnnnnnnnnnnnnnnnnnnnnnnnnnnnnnnnnnnnnnnnnnnnnnnnnnnnnnnnnnnnnnnnnnnnnnnnnnnnnnnnnnnnnnnnnnnnnnnnnnnnnnnnnnnnnnnnnnnnnnnnnnnnnnnnnnnnnnnnnnnnnnnnnnnnnnnnnnnnnnnnnnnnnnnnnnnnnnnnnnnnnnnnnnnnnnnnnnnnnnnnnnnnnnnnnnnnnnnnnnnnnnnnnnnnnnnnnnnnnnnnnnnnnnnnnnnnnnnnnnnnnnnnnnnnnnnnnnnnnnnnnnnnnnnnnnnnnnnnnnnnnnnnnnnnnnnnnnnnnnnnnnnnnnnnnnnnnnnnnnnnnnnnnnnnnnnnnnnnnnnnnnnnnnnnnnnnnnnnnnnnnnnnnnnnnnnnnnnnnnnnnnnnnnnnnnnnnnnnnnnnnnnnnnnnnnnnnnnnnnnnnnnnnnnnnnnnnnnnnnnnnnnnnnnnnnnnnnnnnnnnnnnnnnnnnnnnnnnnnnnnnnnnnnnnnnnnnnnnnnnnnnnnnnnnnnnnnnnnnnnnnnnnnnnnnnnnnnnnnnnnnnnnnnnnnnnnnnnnnnnnnnnnnnnnnnnnnnnnnnnnnnnnnnnnnnnnnnnnnnnnnnnnnnnnnnnnnnnnnnnnnnnnnnnnnnnnnnnnnnnnnnnnnnnnnnnnnnnnnnnnnnnnnnnnnnnnnnnnnnnnnnnnnnnnnnnnnnnnnnnnnnnnnnnnnnnnnnnnnnnnnnnnnnnnnnnnnnnnnnnnnnnnnnnnnnnnnnnnnnnnnnnnnnnnnnnnnnnnnnnnnnnnnnnnnnnnnnnnnnnnnnnnnnnnnnnnnnnnnnnnnnnnnnnnnnnnnnnnnnnnnnnnnnnnnnnnnnnnnnnnnnnnnnnnnnnnnnnnnnnnnnnnnnnnnnnnnnnnnnnnnnnnnnnnnnnnnnnnnnnnnnnnnnnnnnnnnnnnnnnnnnnnnnnnnnnnnnnnnnnnnnnnnnnnnnnnnnnnnnnnnnnnnnnnnnnnnnnnnnnnnnnnnnnnnnnnnnnnnnnnnnnnnnnnnnnnnnnnnnnnnnnnnnnnnnnnnnnnnnnnnnnnnnnnnnnnnnnnnnnnnnnnnnnnnnnnnnnnnnnnnnnnnnnnnnnnnnnnnnnnnnnnnnnnnnnnnnnnnnnnnnnnnnnnnnnnnnnnnnnnnnnnnnnnnnnnnnnnnnnnnnnnnnnnnnnnnnnnnnnnnnnnnnnnnnnnnnnnnnnnnnnnnnnnnnnnnnnnnnnnnnnnnnnnnnnnnnnnnnnnnnnnnnnnnnnnnnnnnnnnnnnnnnnnnnnnnnnnnnnnnnnnnnnnnnnnnnnnnnnnnnnnnnnnnnnnnnnnnnnnnnnnnnnnnnnnnnnnnnnnnnnnnnnnnnnnnnnnnnnnnnnnnnnnnnnnnnnnnnnnnnnnnnnnnnnnnnnnnnnnnnnnnnnnnnnnnnnnnnnnnnnnnnnnnnnnnnnnnnnnnnnnnnnnnnnnnnnnnnnnnnnnnnnnnnnnnnnnnnnnnnnnnnnnnnnnnnnnnnnnnnnnnnnnnnnnnnnnnnnnnnnnnnnnnnnnnnnnnnnnnnnnnnnnnnnnnnnnnnnnnnnnnnnnnnnnnnnnnnnnnnnnnnnnnnnnnnnnnnnnnnnnnnnnnnnnnnnnnnnnnnnnnnnnnnnnnnnnnnnnnnnnnnnnnnnnnnnnnnnnnnnnnnnnnnnnnnnnnnnnnnnnnnnnnnnnnnnnnnnnnnnnnnnnnnnnnnnnnnnnnnnnnnnnnnnnnnnnnnnnnnnnnnnnnnnnnnnnnnnnnnnnnnnnnnnnnnnnnnnnnnnnnnnnnnnnnnnnnnnnnnnnnnnnnnnnnnnnnnnnnnnnnnnnnnnnnnnnnnnnnnnnnnnnnnnnnnnnnnnnnnnnnnnnnnnnnnnnnnnnnnnnnnnnnnnnnnnnnnnnnnnnnnnnnnnnnnnnnnnnnnnnnnnnnnnnnnnnnnnnnnnnnnnnnnnnnnnnnnnnnnnnnnnnnnnnnnnnnnnnnnnnnnnnnnnnnnnnnnnnnnnnnnnnnnnnnnnnnnnnnnnnnnnnnnnnnnnnnnnnnnnnnnnnnnnnnnnnnnnnnnnnnnnnnnnnnnnnnnnnnnnnnnnnnnnnnnnnnnnnnnnnnnnnnnnnnnnnnnnnnnnnnnnnnnnnnnnnnnnnnnnnnnnnnnnnnnnnnnnnnnnnnnnnnnnnnnnnnnnnnnnnnnnnnnnnnnnnnnnnnnnnnnnnnnnnnnnnnnnnnnnnnnnnnnnnnnnnnnnnnnnnnnnnnnnnnnnnnnnnnnnnnnnnnnnnnnnnnnnnnnnnnnnnnnnnnnnnnnnnnnnnnnnnnnnnnnnnnnnnnnnnnnnnnnnnnnnnnnnnnnnnnnnnnnnnnnnnnnnnnnnnnnnnnnnnnnnnnnnnnnnnnnnnnnnnnnnnnnnnnnnnnnnnnnnnnnnnnnnnnnnnnnnnnnnnnnnnnnnnnnnnnnnnnnnnnnnnnnnnnnnnnnnnnnnnnnnnnnnnnnnnnnnnnnnnnnnnnnnnnnnnnnnnnnnnnnnnnnnnnnnnnnnnnnnnnnnnnnnnnnnnnnnnnnnnnnnnnnnnnnnnnnnnnnnnnnnnnnnnnnnnnnnnnnnnnnnnnnnnnnnnnnnnnnnnnnnnnnnnnnnnnnnnnnnnnnnnnnnnnnnnnnnnnnnnnnnnnnnnnnnnnnnnnnnnnnnnnnnnnnnnnnnnnnnnnnnnnnnnnnnnnnnnnnnnnnnnnnnnnnnnnnnnnnnnnnnnnnnnnnnnnnnnnnnnnnnnnnnnnnnnnnnnnnnnnnnnnnnnnnnnnnnnnnnnnnnnnnnnnnnnnnnnnnnnnnnnnnnnnnnnnnnnnnnnnnnnnnnnnnnnnnnnnnnnnnnnnnnnnnnnnnnnnnnnnnnnnnnnnnnnnnnnnnnnnnnnnnnnnnnnnnnnnnnnnnnnnnnnnnnnnnnnnnnnnnnnnnnnnnnnnnnnnnnnnnnnnnnnnnnnnnnnnnnnnnnnnnnnnnnnnnnnnnnnnnnnnnnnnnnnnnnnnnnnnnnnnnnnnnnnnnnnnnnnnnnnnnnnnnnnnnnnnnnnnnnnnnnnnnnnnnnnnnnnnnnnnnnnnnnnnnnnnnnnnnnnnnnnnnnnnnnnnnnnnnnnnnnnnnnnnnnnnnnnnnnnnnnnnnnnnnnnnnnnnnnnnnnnnnnnnnnnnnnnnnnnnnnnnnnnnnnnnnnnnnnnnnnnnnnnnnnnnnnnnnnnnnnnnnnnnnnnnnnnnnnnnnnnnnnnnnnnnnnnnnnnnnnnnnnnnnnnnnnnnnnnnnnnnnnnnnnnnnnnnnnnnnnnnnnnnnnnnnnnnnnnnnnnnnnnnnnnnnnnnnnnnnnnnnnnnnnnnnnnnnnnnnnnnnnnnnnnnnnnnnnnnnnnnnnnnnnnnnnnnnnnnnnnnnnnnnnnnnnnnnnnnnnnnnnnnnnnnnnnnnnnnnnnnnnnnnnnnnnnnnnnnnnnnnnnnnnnnnnnnnnnnnnnnnnnnnnnnnnnnnnnnnnnnnnnnnnnnnnnnnnnnnnnnnnnnnnnnnnnnnnnnnnnnnnnnnnnnnnnnnnnnnnnnnnnnnnnnnnnnnnnnnnnnnnnnnnnnnnnnnnnnnnnnnnnnnnnnnnnnnnnnnnnnnnnnnnnnnnnnnnnnnnnnnnnnnnnnnnnnnnnnnnnnnnnnnnnnnnnnnnnnnnnnnnnnnnnnnnnnnnnnnnnnnnnnnnnnnnnnnnnnnnnnnnnnnnnnnnnnnnnnnnnnnnnnnnnnnnnnnnnnnnnnnnnnnnnnnnnnnnnnnnnnnnnnnnnnnnnnnnnnnnnnnnnnnnnnnnnnnnnnnnnnnnnnnnnnnnnnnnnnnnnnnnnnnnnnnnnnnnnnnnnnnnnnnnnnnnnnnnnnnnnnnnnnnnnnnnnnnnnnnnnnnnnnnnnnnnnnnnnnnnnnnnnnnnnnnnnnnnnnnnnnnnnnnnnnnnnnnnnnnnnnnnnnnnnnnnnnnnnnnnnnnnnnnnnnnnnnnnnnnnnnnnnnnnnnnnnnnnnnnnnnnnnnnnnnnnnnnnnnnnnnnnnnnnnnnnnnnnnnnnnnnnnnnnnnnnnnnnnnnnnnnnnnnnnnnnnnnnnnnnnnnnnnnnnnnnnnnnnnnnnnnnnnnnnnnnnnnnnnnnnnnnnnnnnnnnnnnnnnnnnnnnnnnnnnnnnnnnnnnnnnnnnnnnnnnnnnnnnnnnnnnnnnnnnnnnnnnnnnnnnnnnnnnnnnnnnnnnnnnnnnnnnnnnnnnnnnnnnnnnnnnnnnnnnnnnnnnnnnnnnnnnnnnnnnnnnnnnnnnnnnnnnnnnnnnnnnnnnnnnnnnnnnnnnnnnnnnnnnnnnnnnnnnnnnnnnnnnnnnnnnnnnnnnnnnnnnnnnnnnnnnnnnnnnnnnnnnnnnnnnnnnnnnnnnnnnnnnnnnnnnnnnnnnnnnnnnnnnnnnnnnnnnnnnnnnnnnnnnnnnnnnnnnnnnnnnnnnnnnnnnnnnnnnnnnnnnnnnnnnnnnnnnnnnnnnnnnnnnnnnnnnnnnnnnnnnnnnnnnnnnnnnnnnnnnnnnnnnnnnnnnnnnnnnnnnnnnnnnnnnnnnnnnnnnnnnnnnnnnnnnnnnnnnnnnnnnnnnnnnnnnnnnnnnnnnnnnnnnnnnnnnnnnnnnnnnnnnnnnnnnnnnnnnnnnnnnnnnnnnnnnnnnnnnnnnnnnnnnnnnnnnnnnnnnnnnnnnnnnnnnnnnnnnnnnnnnnnnnnnnnnnnnnnnnnnnnnnnnnnnnnnnnnnnnnnnnnnnnnnnnnnnnnnnnnnnnnnnnnnnnnnnnnnnnnnnnnnnnnnnnnnnnnnnnnnnnnnnnnnnnnnnnnnnnnnnnnnnnnnnnnnnnnnnnnnnnnnnnnnnnnnnnnnnnnnnnnnnnnnnnnnnnnnnnnnnnnnnnnnnnnnnnnnnnnnnnnnnnnnnnnnnnnnnnnnnnnnnnnnnnnnnnnnnnnnnnnnnnnnnnnnnnnnnnnnnnnnnnnnnnnnnnnnnnnnnnnnnnnnnnnnnnnnnnnnnnnnnnnnnnnnnnnnnnnnnnnnnnnnnnnnnnnnnnnnnnnnnnnnnnnnnnnnnnnnnnnnnnnnnnnnnnnnnnnnnnnnnnnnnnnnnnnnnnnnnnnnnnnnnnnnnnnnnnnnnnnnnnnnnnnnnnnnnnnnnnnnnnnnnnnnnnnnnnnnnnnnnnnnnnnnnnnnnnnnnnnnnnnnnnnnnnnnnnnnnnnnnnnnnnnnnnnnnnnnnnnnnnnnnnnnnnnnnnnnnnnnnnnnnnnnnnnnnnnnnnnnnnnnnnnnnnnnnnnnnnnnnnnnnnnnnnnnnnnnnnnnnnnnnnnnnnnnnnnnnnnnnnnnnnnnnnnnnnnnnnnnnnnnnnnnnnnnnnnnnnnnnnnnnnnnnnnnnnnnnnnnnnnnnnnnnnnnnnnnnnnnnnnnnnnnnnnnnnnnnnnnnnnnnnnnnnnnnnnnnnnnnnnnnnnnnnnnnnnnnnnnnnnnnnnnnnnnnnnnnnnnnnnnnnnnnnnnnnnnnnnnnnnnnnnnnnnnnnnnnnnnnnnnnnnnnnnnnnnnnnnnnnnnnnnnnnnnnnnnnnnnnnnnnnnnnnnnnnnnnnnnnnnnnnnnnnnnnnnnnnnnnnnnnnnnnnnnnnnnnnnnnnnnnnnnnnnnnnnnnnnnnnnnnnnnnnnnnnnnnnnnnnnnnnnnnnnnnnnnnnnnnnnnnnnnnnnnnnnnnnnnnnnnnnnnnnnnnnnnnnnnnnnnnnnnnnnnnnnnnnnnnnnnnnnnnnnnnnnnnnnnnnnnnnnnnnnnnnnnnnnnnnnnnnnnnnnnnnnnnnnnnnnnnnnnnnnnnnnnnnnnnnnnnnnnnnnnnnnnnnnnnnnnnnnnnnnnnnnnnnnnnnnnnnnnnnnnnnnnnnnnnnnnnnnnnnnnnnnnnnnnnnnnnnnnnnnnnnnnnnnnnnnnnnnnnnnnnnnnnnnnnnnnnnnnnnnnnnnnnnnnnnnnnnnnnnnnnnnnnnnnnnnnnnnnnnnnnnnnnnnnnnnnnnnnnnnnnnnnnnnnnnnnnnnnnnnnnnnnnnnnnnnnnnnnnnnnnnnnnnnnnnnnnnnnnnnnnnnnnnnnnnnnnnnnnnnnnnnnnnnnnnnnnnnnnnnnnnnnnnnnnnnnnnnnnnnnnnnnnnnnnnnnnnnnnnnnnnnnnnnnnnnnnnnnnnnnnnnnnnnnnnnnnnnnnnnnnnnnnnnnnnnnnnnnnnnnnnnnnnnnnnnnnnnnnnnnnnnnnnnnnnnnnnnnnnnnnnnnnnnnnnnnnnnnnnnnnnnnnnnnnnnnnnnnnnnnnnnnnnnnnnnnnnnnnnnnnnnnnnnnnnnnnnnnnnnnnnnnnnnnnnnnnnnnnnnnnnnnnnnnnnnnnnnnnnnnnnnnnnnnnnnnnnnnnnnnnnnnnnnnnnnnnnnnnnnnnnnnnnnnnnnnnnnnnnnnnnnnnnnnnnnnnnnnnnnnnnnnnnnnnnnnnnnnnnnnnnnnnnnnnnnnnnnnnnnnnnnnnnnnnnnnnnnnnnnnnnnnnnnnnnnnnnnnnnnnnnnnnnnnnnnnnnnnnnnnnnnnnnnnnnnnnnnnnnnnnnnnnnnnnnnnnnnnnnnnnnnnnnnnnnnnnnnnnnnnnnnnnnnnnnnnnnnnnnnnnnnnnnnnnnnnnnnnnnnnnnnnnnnnnnnnnnnnnnnnnnnnnnnnnnnnnnnnnnnnnnnnnnnnnnnnnnnnnnnnnnnnnnnnnnnnnnnnnnnnnnnnnnnnnnnnnnnnnnnnnnnnnnnnnnnnnnnnnnnnnnnnnnnnnnnnnnnnnnnnnnnnnnnnnnnnnnnnnnnnnnnnnnnnnnnnnnnnnnnnnnnnnnnnnnnnnnnnnnnnnnnnnnnnnnnnnnnnnnnnnnnnnnnnnnnnnnnnnnnnnnnnnnnnnnnnnnnnnnnnnnnnnnnnnnnnnnnnnnnnnnnnnnnnnnnnnnnnnnnnnnnnnnnnnnnnnnnnnnnnnnnnnnnnnnnnnnnnnnnnnnnnnnnnnnnnnnnnnnnnnnnnnnnnnnnnnnnnnnnnnnnnnnnnnnnnnnnnnnnnnnnnnnnnnnnnnnnnnnnnnnnnnnnnnnnnnnnnnnnnnnnnnnnnnnnnnnnnnnnnnnnnnnnnnnnnnnnnnnnnnnnnnnnnnnnnnnnnnnnnnnnnnnnnnnnnnnnnnnnnnnnnnnnnnnnnnnnnnnnnnnnnnnnnnnnnnnnnnnnnnnnnnnnnnnnnnnnnnnnnnnnnnnnnnnnnnnnnnnnnnnnnnnnnnnnnnnnnnnnnnnnnnnnnnnnnnnnnnnnnnnnnnnnnnnnnnnnnnnnnnnnnnnnnnnnnnnnnnnnnnnnnnnnnnnnnnnnnnnnnnnnnnnnnnnnnnnnnnnnnnnnnnnnnnnnnnnnnnnnnnnnnnnnnnnnnnnnnnnnnnnnnnnnnnnnnnnnnnnnnnnnnnnnnnnnnnnnnnnnnnnnnnnnnnnnnnnnnnnnnnnnnnnnnnnnnnnnnnnnnnnnnnnnnnnnnnnnnnnnnnnnnnnnnnnnnnnnnnnnnnnnnnnnnnnnnnnnnnnnnnnnnnnnnnnnnnnnnnnnnnnnnnnnnnnnnnnnnnnnnnnnnnnnnnnnnnnnnnnnnnnnnnnnnnnnnnnnnnnnnnnnnnnnnnnnnnnnnnnnnnnnnnnnnnnnnnnnnnnnnnnnnnnnnnnnnnnnnnnnnnnnnnnnnnnnnnnnnnnnnnnnnnnnnnnnnnnnnnnnnnnnnnnnnnnnnnnnnnnnnnnnnnnnnnnnnnnnnnnnnnnnnnnnnnnnnnnnnnnnnnnnnnnnnnnnnnnnnnnnnnnnnnnnnnnnnnnnnnnnnnnnnnnnnnnnnnnnnnnnnnnnnnnnnnnnnnnnnnnnnnnnnnnnnnnnnnnnnnnnnnnnnnnnnnnnnnnnnnnnnnnnnnnnnnnnnnnnnnnnnnnnnnnnnnnnnnnnnnnnnnnnnnnnnnnnnnnnnnnnnnnnnnnnnnnnnnnnnnnnnnnnnnnnnnnnnnnnnnnnnnnnnnnnnnnnnnnnnnnnnnnnnnnnnnnnnnnnnnnnnnnnnnnnnnnnnnnnnnnnnnnnnnnnnnnnnnnnnnnnnnnnnnnnnnnnnnnnnnnnnnnnnnnnnnnnnnnnnnnnnnnnnnnnnnnnnnnnnnnnnnnnnnnnnnnnnnnnnnnnnnnnnnnnnnnnnnnnnnnnnnnnnnnnnnnnnnnnnnnnnnnnnnnnnnnnnnnnnnnnnnnnnnnnnnnnnnnnnnnnnnnnnnnnnnnnnnnnnnnnnnnnnnnnnnnnnnnnnnnnnnnnnnnnnnnnnnnnnnnnnnnnnnnnnnnnnnnnnnnnnnnnnnnnnnnnnnnnnnnnnnnnnnnnnnnnnnnnnnnnnnnnnnnnnnnnnnnnnnnnnnnnnnnnnnnnnnnnnnnnnnnnnnnnnnnnnnnnnnnnnnnnnnnnnnnnnnnnnnnnnnnnnnnnnnnnnnnnnnnnnnnnnnnnnnnnnnnnnnnnnnnnnnnnnnnnnnnnnnnnnnnnnnnnnnnnnnnnnnnnnnnnnnnnnnnnnnnnnnnnnnnnnnnnnnnnnnnnnnnnnnnnnnnnnnnnnnnnnnnnnnnnnnnnnnnnnnnnnnnnnnnnnnnnnnnnnnnnnnnnnnnnnnnnnnnnnnnnnnnnnnnnnnnnnnnnnnnnnnnnnnnnnnnnnnnnnnnnnnnnnnnnnnnnnnnnnnnnnnnnnnnnnnnnnnnnnnnnnnnnnnnnnnnnnnnnnnnnnnnnnnnnnnnnnnnnnnnnnnnnnnnnnnnnnnnnnnnnnnnnnnnnnnnnnnnnnnnnnnnnnnnnnnnnnnnnnnnnnnnnnnnnnnnnnnnnnnnnnnnnnnnnnnnnnnnnnnnnnnnnnnnnnnnnnnnnnnnnnnnnnnnnnnnnnnnnnnnnnnnnnnnnnnnnnnnnnnnnnnnnnnnnnnnnnnnnnnnnnnnnnnnnnnnnnnnnnnnnnnnnnnnnnnnnnnnnnnnnnnnnnnnnnnnnnnnnnnnnnnnnnnnnnnnnnnnnnnnnnnnnnnnnnnnnnnnnnnnnnnnnnnnnnnnnnnnnnnnnnnnnnnnnnnnnnnnnnnnnnnnnnnnnnnnnnnnnnnnnnnnnnnnnnnnnnnnnnnnnnnnnnnnnnnnnnnnnnnnnnnnnnnnnnnnnnnnnnnnnnnnnnnnnnnnnnnnnnnnnnnnnnnnnnnnnnnnnnnnnnnnnnnnnnnnnnnnnnnnnnnnnnnnnnnnnnnnnnnnnnnnnnnnnnnnnnnnnnnnnnnnnnnnnnnnnnnnnnnnnnnnnnnnnnnnnnnnnnnnnnnnnnnnnnnnnnnnnnnnnnnnnnnnnnnnnnnnnnnnnnnnnnnnnnnnnnnnnnnnnnnnnnnnnnnnnnnnnnnnnnnnnnnnnnnnnnnnnnnnnnnnnnnnnnnnnnnnnnnnnnnnnnnnnnnnnnnnnnnnnnnnnnnnnnnnnnnnnnnnnnnnnnnnnnnnnnnnnnnnnnnnnnnnnnnnnnnnnnnnnnnnnnnnnnnnnnnnnnnnnnnnnnnnnnnnnnnnnnnnnnnnnnnnnnnnnnnnnnnnnnnnnnnnnnnnnnnnnnnnnnnnnnnnnnnnnnnnnnnnnnnnnnnnnnnnnnnnnnnnnnnnnnnnnnnnnnnnnnnnnnnnnnnnnnnnnnnnnnnnnnnnnnnnnnnnnnnnnnnnnnnnnnnnnnnnnnnnnnnnnnnnnnnnnnnnnnnnnnnnnnnnnnnnnnnnnnnnnnnnnnnnnnnnnnnnnnnnnnnnnnnnnnnnnnnnnnnnnnnnnnnnnnnnnnnnnnnnnnnnnnnnnnnnnnnnnnnnnnnnnnnnnnnnnnnnnnnnnnnnnnnnnnnnnnnnnnnnnnnnnnnnnnnnnnnnnnnnnnnnnnnnnnnnnnnnnnnnnnnnnnnnnnnnnnnnnnnnnnnnnnnnnnnnnnnnnnnnnnnnnnnnnnnnnnnnnnnnnnnnnnnnnnnnnnnnnnnnnnnnnnnnnnnnnnnnnnnnnnnnnnnnnnnnnnnnnnnnnnnnnnnnnnnnnnnnnnnnnnnnnnnnnnnnnnnnnnnnnnnnnnnnnnnnnnnnnnnnnnnnnnnnnnnnnnnnnnnnnnnnnnnnnnnnnnnnnnnnnnnnnnnnnnnnnnnnnnnnnnnnnnnnnnnnnnnnnnnnnnnnnnnnnnnnnnnnnnnnnnnnnnnnnnnnnnnnnnnnnnnnnnnnnnnnnnnnnnnnnnnnnnnnnnnnnnnnnnnnnnnnnnnnnnnnnnnnnnnnnnnnnnnnnnnnnnnnnnnnnnnnnnnnnnnnnnnnnnnnnnnnnnnnnnnnnnnnnnnnnnnnnnnnnnnnnnnnnnnnnnnnnnnnnnnnnnnnnnnnnnnnnnnnnnnnnnnnnnnnnnnnnnnnnnnnnnnnnnnnnnnnnnnnnnnnnnnnnnnnnnnnnnnnnnnnnnnnnnnnnnnnnnnnnnnnnnnnnnnnnnnnnnnnnnnnnnnnnnnnnnnnnnnnnnnnnnnnnnnnnnnnnnnnnnnnnnnnnnnnnnnnnnnnnnnnnnnnnnnnnnnnnnnnnnnnnnnnnnnnnnnnnnnnnnnnnnnnnnnnnnnnnnnnnnnnnnnnnnnnnnnnnnnnnnnnnnnnnnnnnnnnnnnnnnnnnnnnnnnnnnnnnnnnnnnnnnnnnnnnnnnnnnnnnnnnnnnnnnnnnnnnnnnnnnnnnnnnnnnnnnnnnnnnnnnnnnnnnnnnnnnnnnnnnnnnnnnnnnnnnnnnnnnnnnnnnnnnnnnnnnnnnnnnnnnnnnnnnnnnnnnnnnnnnnnnnnnnnnnnnnnnnnnnnnnnnnnnnnnnnnnnnnnnnnnnnnnnnnnnnnnnnnnnnnnnnnnnnnnnnnnnnnnnnnnnnnnnnnnnnnnnnnnnnnnnnnnnnnnnnnnnnnnnnnnnnnnnnnnnnnnnnnnnnnnnnnnnnnnnnnnnnnnnnnnnnnnnnnnnnnnnnnnnnnnnnnnnnnnnnnnnnnnnnnnnnnnnnnnnnnnnnnnnnnnnnnnnnnnnnnnnnnnnnnnnnnnnnnnnnnnnnnnnnnnnnnnnnnnnnnnnnnnnnnnnnnnnnnnnnnnnnnnnnnnnnnnnnnnnnnnnnnnnnnnnnnnnnnnnnnnnnnnnnnnnnnnnnnnnnnnnnnnnnnnnnnnnnnnnnnnnnnnnnnnnnnnnnnnnnnnnnnnnnnnnnnnnnnnnnnnnnnnnnnnnnnnnnnnnnnnnnnnnnnnnnnnnnnnnnnnnnnnnnnnnnnnnnnnnnnnnnnnnnnnnnnnnnnnnnnnnnnnnnnnnnnnnnnnnnnnnnnnnnnnnnnnnnnnnnnnnnnnnnnnnnnnnnnnnnnnnnnnnnnnnnnnnnnnnnnnnnnnnnnnnnnnnnnnnnnnnnnnnnnnnnnnnnnnnnnnnnnnnnnnnnnnnnnnnnnnnnnnnnnnnnnnnnnnnnnnnnnnnnnnnnnnnnnnnnnnnnnnnnnnnnnnnnnnnnnnnnnnnnnnnnnnnnnnnnnnnnnnnnnnnnnnnnnnnnnnnnnnnnnnnnnnnnnnnnnnnnnnnnnnnnnnnnnnnnnnnnnnnnnnnnnnnnnnnnnnnnnnnnnnnnnnnnnnnnnnnnnnnnnnnnnnnnnnnnnnnnnnnnnnnnnnnnnnnnnnnnnnnnnnnnnnnnnnnnnnnnnnnnnnnnnnnnnnnnnnnnnnnnnnnnnnnnnnnnnnnnnnnnnnnnnnnnnnnnnnnnnnnnnnnnnnnnnnnnnnnnnnnnnnnnnnnnnnnnnnnnnnnnnnnnnnnnnnnnnnnnnnnnnnnnnnnnnnnnnnnnnnnnnnnnnnnnnnnnnnnnnnnnnnnnnnnnnnnnnnnnnnnnnnnnnnnnnnnnnnnnnnnnnnnnnnnnnnnnnnnnnnnnnnnnnnnnnnnnnnnnnnnnnnnnnnnnnnnnnnnnnnnnnnnnnnnnnnnnnnnnnnnnnnnnnnnnnnnnnnnnnnnnnnnnnnnnnnnnnnnnnnnnnnnnnnnnnnnnnnnnnnnnnnnnnnnnnnnnnnnnnnnnnnnnnnnnnnnnnnnnnnnnnnnnnnnnnnnnnnnnnnnnnnnnnnnnnnnnnnnnnnnnnnnnnnnnnnnnnnnnnnnnnnnnnnnnnnnnnnnnnnnnnnnnnnnnnnnnnnnnnnnnnnnnnnnnnnnnnnnnnnnnnnnnnnnnnnnnnnnnnnnnnnnnnnnnnnnnnnnnnnnnnnnnnnnnnnnnnnnnnnnnnnnnnnnnnnnnnnnnnnnnnnnnnnnnnnnnnnnnnnnnnnnnnnnnnnnnnnnnnnnnnnnnnnnnnnnnnnnnnnnnnnnnnnnnnnnnnnnnnnnnnnnnnnnnnnnnnnnnnnnnnnnnnnnnnnnnnnnnnnnnnnnnnnnnnnnnnnnnnnnnnnnnnnnnnnnnnnnnnnnnnnnnnnnnnnnnnnnnnnnnnnnnnnnnnnnnnnnnnnnnnnnnnnnnnnnnnnnnnnnnnnnnnnnnnnnnnnnnnnnnnnnnnnnnnnnnnnnnnnnnnnnnnnnnnnnnnnnnnnnnnnnnnnnnnnnnnnnnnnnnnnnnnnnnnnnnnnnnnnnnnnnnnnnnnnnnnnnnnnnnnnnnnnnnnnnnnnnnnnnnnnnnnnnnnnnnnnnnnnnnnnnnnnnnnnnnnnnnnnnnnnnnnnnnnnnnnnnnnnnnnnnnnnnnnnnnnnnnnnnnnnnnnnnnnnnnnnnnnnnnnnnnnnnnnnnnnnnnnnnnnnnnnnnnnnnnnnnnnnnnnnnnnnnnnnnnnnnnnnnnnnnnnnnnnnnnnnnnnnnnnnnnnnnnnnnnnnnnnnnnnnnnnnnnnnnnnnnnnnnnnnnnnnnnnnnnnnnnnnnnnnnnnnnnnnnnnnnnnnnnnnnnnnnnnnnnnnnnnnnnnnnnnnnnnnnnnnnnnnnnnnnnnnnnnnnnnnnnnnnnnnnnnnnnnnnnnnnnnnnnnnnnnnnnnnnnnnnnnnnnnnnnnnnnnnnnnnnnnnnnnnnnnnnnnnnnnnnnnnnnnnnnnnnnnnnnnnnnnnnnnnnnnnnnnnnnnnnnnnnnnnnnnnnnnnnnnnnnnnnnnnnnnnnnnnnnnnnnnnnnnnnnnnnnnnnnnnnnnnnnnnnnnnnnnnnnnnnnnnnnnnnnnnnnnnnnnnnnnnnnnnnnnnnnnnnnnnnnnnnnnnnnnnnnnnnnnnnnnnnnnnnnnnnnnnnnnnnnnnnnnnnnnnnnnnnnnnnnnnnnnnnnnnnnnnnnnnnnnnnnnnnnnnnnnnnnnnnnnnnnnnnnnnnnnnnnnnnnnnnnnnnnnnnnnnnnnnnnnnnnnnnnnnnnnnnnnnnnnnnnnnnnnnnnnnnnnnnnnnnnnnnnnnnnnnnnnnnnnnnnnnnnnnnnnnnnnnnnnnnnnnnnnnnnnnnnnnnnnnnnnnnnnnnnnnnnnnnnnnnnnnnnnnnnnnnnnnnnnnnnnnnnnnnnnnnnnnnnnnnnnnnnnnnnnnnnnnnnnnnnnnnnnnnnnnnnnnnnnnnnnnnnnnnnnnnnnnnnnnnnnnnnnnnnnnnnnnnnnnnnnnnnnnnnnnnnnnnnnnnnnnnnnnnnnnnnnnnnnnnnnnnnnnnnnnnnnnnnnnnnnnnnnnnnnnnnnnnnnnnnnnnnnnnnnnnnnnnnnnnnnnnnnnnnnnnnnnnnnnnnnnnnnnnnnnnnnnnnnnnnnnnnnnnnnnnnnnnnnnnnnnnnnnnnnnnnnnnnnnnnnnnnnnnnnnnnnnnnnnnnnnnnnnnnnnnnnnnnnnnnnnnnnnnnnnnnnnnnnnnnnnnnnnnnnnnnnnnnnnnnnnnnnnnnnnnnnnnnnnnnnnnnnnnnnnnnnnnnnnnnnnnnnnnnnnnnnnnnnnnnnnnnnnnnnnnnnnnnnnnnnnnnnnnnnnnnnnnnnnnnnnnnnnnnnnnnnnnnnnnnnnnnnnnnnnnnnnnnnnnnnnnnnnnnnnnnnnnnnnnnnnnnnnnnnnnnnnnnnnnnnnnnnnnnnnnnnnnnnnnnnnnnnnnnnnnnnnnnnnnnnnnnnnnnnnnnnnnnnnnnnnnnnnnnnnnnnnnnnnnnnnnnnnnnnnnnnnnnnnnnnnnnnnnnnnnnnnnnnnnnnnnnnnnnnnnnnnnnnnnnnnnnnnnnnnnnnnnnnnnnnnnnnnnnnnnnnnnnnnnnnnnnnnnnnnnnnnnnnnnnnnnnnnnnnnnnnnnnnnnnnnnnnnnnnnnnnnnnnnnnnnnnnnnnnnnnnnnnnnnnnnnnnnnnnnnnnnnnnnnnnnnnnnnnnnnnnnnnnnnnnnnnnnnnnnnnnnnnnnnnnnnnnnnnnnnnnnnnnnnnnnnnnnnnnnnnnnnnnnnnnnnnnnnnnnnnnnnnnnnnnnnnnnnnnnnnnnnnnnnnnnnnnnnnnnnnnnnnnnnnnnnnnnnnnnnnnnnnnnnnnnnnnnnnnnnnnnnnnnnnnnnnnnnnnnnnnnnnnnnnnnnnnnnnnnnnnnnnnnnnnnnnnnnnnnnnnnnnnnnnnnnnnnnnnnnnnnnnnnnnnnnnnnnnnnnnnnnnnnnnnnnnnnnnnnnnnnnnnnnnnnnnnnnnnnnnnnnnnnnnnnnnnnnnnnnnnnnnnnnnnnnnnnnnnnnnnnnnnnnnnnnnnnnnnnnnnnnnnnnnnnnnnnnnnnnnnnnnnnnnnnnnnnnnnnnnnnnnnnnnnnnnnnnnnnnnnnnnnnnnnnnnnnnnnnnnnnnnnnnnnnnnnnnnnnnnnnnnnnnnnnnnnnnnnnnnnnnnnnnnnnnnnnnnnnnnnnnnnnnnnnnnnnnnnnnnnnnnnnnnnnnnnnnnnnnnnnnnnnnnnnnnnnnnnnnnnnnnnnnnnnnnnnnnnnnnnnnnnnnnnnnnnnnnnnnnnnnnnnnnnnnnnnnnnnnnnnnnnnnnnnnnnnnnnnnnnnnnnnnnnnnnnnnnnnnnnnnnnnnnnnnnnnnnnnnnnnnnnnnnnnnnnnnnnnnnnnnnnnnnnnnnnnnnnnnnnnnnnnnnnnnnnnnnnnnnnnnnnnnnnnnnnnnnnnnnnnnnnnnnnnnnnnnnnnnnnnnnnnnnnnnnnnnnnnnnnnnnnnnnnnnnnnnnnnnnnnnnnnnnnnnnnnnnnnnnnnnnnnnnnnnnnnnnnnnnnnnnnnnnnnnnnnnnnnnnnnnnnnnnnnnnnnnnnnnnnnnnnnnnnnnnnnnnnnnnnnnnnnnnnnnnnnnnnnnnnnnnnnnnnnnnnnnnnnnnnnnnnnnnnnnnnnnnnnnnnnnnnnnnnnnnnnnnnnnnnnnnnnnnnnnnnnnnnnnnnnnnnnnnnnnnnnnnnnnnnnnnnnnnnnnnnnnnnnnnnnnnnnnnnnnnnnnnnnnnnnnnnnnnnnnnnnnnnnnnnnnnnnnnnnnnnnnnnnnnnnnnnnnnnnnnnnnnnnnnnnnnnnnnnnnnnnnnnnnnnnnnnnnnnnnnnnnnnnnnnnnnnnnnnnnnnnnnnnnnnnnnnnnnnnnnnnnnnnnnnnnnnnnnnnnnnnnnnnnnnnnnnnnnnnnnnnnnnnnnnnnnnnnnnnnnnnnnnnnnnnnnnnnnnnnnnnnnnnnnnnnnnnnnnnnnnnnnnnnnnnnnnnnnnnnnnnnnnnnnnnnnnnnnnnnnnnnnnnnnnnnnnnnnnnnnnnnnnnnnnnnnnnnnnnnnnnnnnnnnnnnnnnnnnnnnnnnnnnnnnnnnnnnnnnnnnnnnnnnnnnnnnnnnnnnnnnnnnnnnnnnnnnnnnnnnnnnnnnnnnnnnnnnnnnnnnnnnnnnnnnnnnnnnnnnnnnnnnnnnnnnnnnnnnnnnnnnnnnnnnnnnnnnnnnnnnnnnnnnnnnnnnnnnnnnnnnnnnnnnnnnnnnnnnnnnnnnnnnnnnnnnnnnnnnnnnnnnnnnnnnnnnnnnnnnnnnnnnnnnnnnnnnnnnnnnnnnnnnnnnnnnnnnnnnnnnnnnnnnnnnnnnnnnnnnnnnnnnnnnnnnnnnnnnnnnnnnnnnnnnnnnnnnnnnnnnnnnnnnnnnnnnnnnnnnnnnnnnnnnnnnnnnnnnnnnnnnnnnnnnnnnnnnnnnnnnnnnnnnnnnnnnnnnnnnnnnnnnnnnnnnnnnnnnnnnnnnnnnnnnnnnnnnnnnnnnnnnnnnnnnnnnnnnnnnnnnnnnnnnnnnnnnnnnnnnnnnnnnnnnnnnnnnnnnnnnnnnnnnnnnnnnnnnnnnnnnnnnnnnnnnnnnnnnnnnnnnnnnnnnnnnnnnnnnnnnnnnnnnnnnnnnnnnnnnnnnnnnnnnnnnnnnnnnnnnnnnnnnnnnnnnnnnnnnnnnnnnnnnnnnnnnnnnnnnnnnnnnnnnnnnnnnnnnnnnnnnnnnnnnnnnnnnnnnnnnnnnnnnnnnnnnnnnnnnnnnnnnnnnnnnnnnnnnnnnnnnnnnnnnnnnnnnnnnnnnnnnnnnnnnnnnnnnnnnnnnnnnnnnnnnnnnnnnnnnnnnnnnnnnnnnnnnnnnnnnnnnnnnnnnnnnnnnnnnnnnnnnnnnnnnnnnnnnnnnnnnnnnnnnnnnnnnnnnnnnnnnnnnnnnnnnnnnnnnnnnnnnnnnnnnnnnnnnnnnnnnnnnnnnnnnnnnnnnnnnnnnnnnnnnnnnnnnnnnnnnnnnnnnnnnnnnnnnnnnnnnnnnnnnnnnnnnnnnnnnnnnnnnnnnnnnnnnnnnnnnnnnnnnnnnnnnnnnnnnnnnnnnnnnnnnnnnnnnnnnnnnnnnnnnnnnnnnnnnnnnnnnnnnnnnnnnnnnnnnnnnnnnnnnnnnnnnnnnnnnnnnnnnnnnnnnnnnnnnnnnnnnnnnnnnnnnnnnnnnnnnnnnnnnnnnnnnnnnnnnnnnnnnnnnnnnnnnnnnnnnnnnnnnnnnnnnnnnnnnnnnnnnnnnnnnnnnnnnnnnnnnnnnnnnnnnnnnnnnnnnnnnnnnnnnnnnnnnnnnnnnnnnnnnnnnnnnnnnnnnnnnnnnnnnnnnnnnnnnnnnnnnnnnnnnnnnnnnnnnnnnnnnnnnnnnnnnnnnnnnnnnnnnnnnnnnnnnnnnnnnnnnnnnnnnnnnnnnnnnnnnnnnnnnnnnnnnnnnnnnnnnnnnnnnnnnnnnnnnnnnnnnnnnnnnnnnnnnnnnnnnnnnnnnnnnnnnnnnnnnnnnnnnnnnnnnnnnnnnnnnnnnnnnnnnnnnnnnnnnnnnnnnnnnnnnnnnnnnnnnnnnnnnnnnnnnnnnnnnnnnnnnnnnnnnnnnnnnnnnnnnnnnnnnnnnnnnnnnnnnnnnnnnnnnnnnnnnnnnnnnnnnnnnnnnnnnnnnnnnnnnnnnnnnnnnnnnnnnnnnnnnnnnnnnnnnnnnnnnnnnnnnnnnnnnnnnnnnnnnnnnnnnnnnnnnnnnnnnnnnnnnnnnnnnnnnnnnnnnnnnnnnnnnnnnnnnnnnnnnnnnnnnnnnnnnnnnnnnnnnnnnnnnnnnnnnnnnnnnnnnnnnnnnnnnnnnnnnnnnnnnnnnnnnnnnnnnnnnnnnnnnnnnnnnnnnnnnnnnnnnnnnnnnnnnnnnnnnnnnnnnnnnnnnnnnnnnnnnnnnnnnnnnnnnnnnnnnnnnnnnnnnnnnnnnnnnnnnnnnnnnnnnnnnnnnnnnnnnnnnnnnnnnnnnnnnnnnnnnnnnnnnnnnnnnnnnnnnnnnnnnnnnnnnnnnnnnnnnnnnnnnnnnnnnnnnnnnnnnnnnnnnnnnnnnnnnnnnnnnnnnnnnnnnnnnnnnnnnnnnnnnnnnnnnnnnnnnnnnnnnnnnnnnnnnnnnnnnnnnnnnnnnnnnnnnnnnnnnnnnnnnnnnnnnnnnnnnnnnnnnnnnnnnnnnnnnnnnnnnnnnnnnnnnnnnnnnnnnnnnnnnnnnnnnnnnnnnnnnnnnnnnnnnnnnnnnnnnnnnnnnnnnnnnnnnnnnnnnnnnnnnnnnnnnnnnnnnnnnnnnnnnnnnnnnnnnnnnnnnnnnnnnnnnnnnnnnnnnnnnnnnnnnnnnnnnnnnnnnnnnnnnnnnnnnnnnnnnnnnnnnnnnnnnnnnnnnnnnnnnnnnnnnnnnnnnnnnnnnnnnnnnnnnnnnnnnnnnnnnnnnnnnnnnnnnnnnnnnnnnnnnnnnnnnnnnnnnnnnnnnnnnnnnnnnnnnnnnnnnnnnnnnnnnnnnnnnnnnnnnnnnnnnnnnnnnnnnnnnnnnnnnnnnnnnnnnnnnnnnnnnnnnnnnnnnnnnnnnnnnnnnnnnnnnnnnnnnnnnnnnnnnnnnnnnnnnnnnnnnnnnnnnnnnnnnnnnnnnnnnnnnnnnnnnnnnnnnnnnnnnnnnnnnnnnnnnnnnnnnnnnnnnnnnnnnnnnnnnnnnnnnnnnnnnnnnnnnnnnnnnnnnnnnnnnnnnnnnnnnnnnnnnnnnnnnnnnnnnnnnnnnnnnnnnnnnnnnnnnnnnnnnnnnnnnnnnnnnnnnnnnnnnnnnnnnnnnnnnnnnnnnnnnnnnnnnnnnnnnnnnnnnnnnnnnnnnnnnnnnnnnnnnnnnnnnnnnnnnnnnnnnnnnnnnnnnnnnnnnnnnnnnnnnnnnnnnnnnnnnnnnnnnnnnnnnnnnnnnnnnnnnnnnnnnnnnnnnnnnnnnnnnnnnnnnnnnnnnnnnnnnnnnnnnnnnnnnnnnnnnnnnnnnnnnnnnnnnnnnnnnnnnnnnnnnnnnnnnnnnnnnnnnnnnnnnnnnnnnnnnnnnnnnnnnnnnnnnnnnnnnnnnnnnnnnnnnnnnnnnnnnnnnnnnnnnnnnnnnnnnnnnnnnnnnnnnnnnnnnnnnnnnnnnnnnnnnnnnnnnnnnnnnnnnnnnnnnnnnnnnnnnnnnnnnnnnnnnnnnnnnnnnnnnnnnnnnnnnnnnnnnnnnnnnnnnnnnnnnnnnnnnnnnnnnnnnnnnnnnnnnnnnnnnnnnnnnnnnnnnnnnnnnnnnnnnnnnnnnnnnnnnnnnnnnnnnnnnnnnnnnnnnnnnnnnnnnnnnnnnnnnnnnnnnnnnnnnnnnnnnnnnnnnnnnnnnnnnnnnnnnnnnnnnnnnnnnnnnnnnnnnnnnnnnnnnnnnnnnnnnnnnnnnnnnnnnnnnnnnnnnnnnnnnnnnnnnnnnnnnnnnnnnnnnnnnnnnnnnnnnnnnnnnnnnnnnnnnnnnnnnnnnnnnnnnnnnnnnnnnnnnnnnnnnnnnnnnnnnnnnnnnnnnnnnnnnnnnnnnnnnnnnnnnnnnnnnnnnnnnnnnnnnnnnnnnnnnnnnnnnnnnnnnnnnnnnnnnnnnnnnnnnnnnnnnnnnnnnnnnnnnnnnnnnnnnnnnnnnnnnnnnnnnnnnnnnnnnnnnnnnnnnnnnnnnnnnnnnnnnnnnnnnnnnnnnnnnnnnnnnnnnnnnnnnnnnnnnnnnnnnnnnnnnnnnnnnnnnnnnnnnnnnnnnnnnnnnnnnnnnnnnnnnnnnnnnnnnnnnnnnnnnnnnnnnnnnnnnnnnnnnnnnnnnnnnnnnnnnnnnnnnnnnnnnnnnnnnnnnnnnnnnnnnnnnnnnnnnnnnnnnnnnnnnnnnnnnnnnnnnnnnnnnnnnnnnnnnnnnnnnnnnnnnnnnnnnnnnnnnnnnnnnnnnnnnnnnnnnnnnnnnnnnnnnnnnnnnnnnnnnnnnnnnnnnnnnnnnnnnnnnnnnnnnnnnnnnnnnnnnnnnnnnnnnnnnnnnnnnnnnnnnnnnnnnnnnnnnnnnnnnnnnnnnnnnnnnnnnnnnnnnnnnnnnnnnnnnnnnnnnnnnnnnnnnnnnnnnnnnnnnnnnnnnnnnnnnnnnnnnnnnnnnnnnnnnnnnnnnnnnnnnnnnnnnnnnnnnnnnnnnnnnnnnnnnnnnnnnnnnnnnnnnnnnnnnnnnnnnnnnnnnnnnnnnnnnnnnnnnnnnnnnnnnnnnnnnnnnnnnnnnnnnnnnnnnnnnnnnnnnnnnnnnnnnnnnnnnnnnnnnnnnnnnnnnnnnnnnnnnnnnnnnnnnnnnnnnnnnnnnnnnnnnnnnnnnnnnnnnnnnnnnnnnnnnnnnnnnnnnnnnnnnnnnnnnnnnnnnnnnnnnnnnnnnnnnnnnnnnnnnnnnnnnnnnnnnnnnnnnnnnnnnnnnnnnnnnnnnnnnnnnnnnnnnnnnnnnnnnnnnnnnnnnnnnnnnnnnnnnnnnnnnnnnnnnnnnnnnnnnnnnnnnnnnnnnnnnnnnnnnnnnnnnnnnnnnnnnnnnnnnnnnnnnnnnnnnnnnnnnnnnnnnnnnnnnnnnnnnnnnnnnnnnnnnnnnnnnnnnnnnnnnnnnnnnnnnnnnnnnnnnnnnnnnnnnnnnnnnnnnnnnnnnnnnnnnnnnnnnnnnnnnnnnnnnnnnnnnnnnnnnnnnnnnnnnnnnnnnnnnnnnnnnnnnnnnnnnnnnnnnnnnnnnnnnnnnnnnnnnnnnnnnnnnnnnnnnnnnnnnnnnnnnnnnnnnnnnnnnnnnnnnnnnnnnnnnnnnnnnnnnnnnnnnnnnnnnnnnnnnnnnnnnnnnnnnnnnnnnnnnnnnnnnnnnnnnnnnnnnnnnnnnnnnnnnnnnnnnnnnnnnnnnnnnnnnnnnnnnnnnnnnnnnnnnnnnnnnnnnnnnnnnnnnnnnnnnnnnnnnnnnnnnnnnnnnnnnnnnnnnnnnnnnnnnnnnnnnnnnnnnnnnnnnnnnnnnnnnnnnnnnnnnnnnnnnnnnnnnnnnnnnnnnnnnnnnnnnnnnnnnnnnnnnnnnnnnnnnnnnnnnnnnnnnnnnnnnnnnnnnnnnnnnnnnnnnnnnnnnnnnnnnnnnnnnnnnnnnnnnnnnnnnnnnnnnnnnnnnnnnnnnnnnnnnnnnnnnnnnnnnnnnnnnnnnnnnnnnnnnnnnnnnnnnnnnnnnnnnnnnnnnnnnnnnnnnnnnnnnnnnnnnnnnnnnnnnnnnnnnnnnnnnnnnnnnnnnnnnnnnnnnnnnnnnnnnnnnnnnnnnnnnnnnnnnnnnnnnnnnnnnnnnnnnnnnnnnnnnnnnnnnnnnnnnnnnnnnnnnnnnnnnnnnnnnnnnnnnnnnnnnnnnnnnnnnnnnnnnnnnnnnnnnnnnnnnnnnnnnnnnnnnnnnnnnnnnnnnnnnnnnnnnnnnnnnnnnnnnnnnnnnnnnnnnnnnnnnnnnnnnnnnnnnnnnnnnnnnnnnnnnnnnnnnnnnnnnnnnnnnnnnnnnnnnnnnnnnnnnnnnnnnnnnnnnnnnnnnnnnnnnnnnnnnnnnnnnnnnnnnnnnnnnnnnnnnnnnnnnnnnnnnnnnnnnnnnnnnnnnnnnnnnnnnnnnnnnnnnnnnnnnnnnnnnnnnnnnnnnnnnnnnnnnnnnnnnnnnnnnnnnnnnnnnnnnnnnnnnnnnnnnnnnnnnnnnnnnnnnnnnnnnnnnnnnnnnnnnnnnnnnnnnnnnnnnnnnnnnnnnnnnnnnnnnnnnnnnnnnnnnnnnnnnnnnnnnnnnnnnnnnnnnnnnnnnnnnnnnnnnnnnnnnnnnnnnnnnnnnnnnnnnnnnnnnnnnnnnnnnnnnnnnnnnnnnnnnnnnnnnnnnnnnnnnnnnnnnnnnnnnnnnnnnnnnnnnnnnnnnnnnnnnnnnnnnnnnnnnnnnnnnnnnnnnnnnnnnnnnnnnnnnnnnnnnnnnnnnnnnnnnnnnnnnnnnnnnnnnnnnnnnnnnnnnnnnnnnnnnnnnnnnnnnnnnnnnnnnnnnnnnnnnnnnnnnnnnnnnnnnnnnnnnnnnnnnnnnnnnnnnnnnnnnnnnnnnnnnnnnnnnnnnnnnnnnnnnnnnnnnnnnnnnnnnnnnnnnnnnnnnnnnnnnnnnnnnnnnnnnnnnnnnnnnnnnnnnnnnnnnnnnnnnnnnnnnnnnnnnnnnnnnnnnnnnnnnnnnnnnnnnnnnnnnnnnnnnnnnnnnnnnnnnnnnnnnnnnnnnnnnnnnnnnnnnnnnnnnnnnnnnnnnnnnnnnnnnnnnnnnnnnnnnnnnnnnnnnnnnnnnnnnnnnnnnnnnnnnnnnnnnnnnnnnnnnnnnnnnnnnnnnnnnnnnnnnnnnnnnnnnnnnnnnnnnnnnnnnnnnnnnnnnnnnnnnnnnnnnnnnnnnnnnnnnnnnnnnnnnnnnnnnnnnnnnnnnnnnnnnnnnnnnnnnnnnnnnnnnnnnnnnnnnnnnnnnnnnnnnnnnnnnnnnnnnnnnnnnnnnnnnnnnnnnnnnnnnnnnnnnnnnnnnnnnnnnnnnnnnnnnnnnnnnnnnnnnnnnnnnnnnnnnnnnnnnnnnnnnnnnnnnnnnnnnnnnnnnnnnnnnnnnnnnnnnnnnnnnnnnnnnnnnnnnnnnnnnnnnnnnnnnnnnnnnnnnnnnnnnnnnnnnnnnnnnnnnnnnnnnnnnnnnnnnnnnnnnnnnnnnnnnnnnnnnnnnnnnnnnnnnnnnnnnnnnnnnnnnnnnnnnnnnnnnnnnnnnnnnnnnnnnnnnnnnnnnnnnnnnnnnnnnnnnnnnnnnnnnnnnnnnnnnnnnnnnnnnnnnnnnnnnnnnnnnnnnnnnnnnnnnnnnnnnnnnnnnnnnnnnnnnnnnnnnnnnnnnnnnnnnnnnnnnnnnnnnnnnnnnnnnnnnnnnnnnnnnnnnnnnnnnnnnnnnnnnnnnnnnnnnnnnnnnnnnnnnnnnnnnnnnnnnnnnnnnnnnnnnnnnnnnnnnnnnnnnnnnnnnnnnnnnnnnnnnnnnnnnnnnnnnnnnnnnnnnnnnnnnnnnnnnnnnnnnnnnnnnnnnnnnnnnnnnnnnnnnnnnnnnnnnnnnnnnnnnnnnnnnnnnnnnnnnnnnnnnnnnnnnnnnnnnnnnnnnnnnnnnnnnnnnnnnnnnnnnnnnnnnnnnnnnnnnnnnnnnnnnnnnnnnnnnnnnnnnnnnnnnnnnnnnnnnnnnnnnnnnnnnnnnnnnnnnnnnnnnnnnnnnnnnnnnnnnnnnnnnnnnnnnnnnnnnnnnnnnnnnnnnnnnnnnnnnnnnnnnnnnnnnnnnnnnnnnnnnnnnnnnnnnnnnnnnnnnnnnnnnnnnnnnnnnnnnnnnnnnnnnnnnnnnnnnnnnnnnnnnnnnnnnnnnnnnnnnnnnnnnnnnnnnnnnnnnnnnnnnnnnnnnnnnnnnnnnnnnnnnnnnnnnnnnnnnnnnnnnnnnnnnnnnnnnnnnnnnnnnnnnnnnnnnnnnnnnnnnnnnnnnnnnnnnnnnnnnnnnnnnnnnnnnnnnnnnnnnnnnnnnnnnnnnnnnnnnnnnnnnnnnnnnnnnnnnnnnnnnnnnnnnnnnnnnnnnnnnnnnnnnnnnnnnnnnnnnnnnnnnnnnnnnnnnnnnnnnnnnnnnnnnnnnnnnnnnnnnnnnnnnnnnnnnnnnnnnnnnnnnnnnnnnnnnnnnnnnnnnnnnnnnnnnnnnnnnnnnnnnnnnnnnnnnnnnnnnnnnnnnnnnnnnnnnnnnnnnnnnnnnnnnnnnnnnnnnnnnnnnnnnnnnnnnnnnnnnnnnnnnnnnnnnnnnnnnnnnnnnnnnnnnnnnnnnnnnnnnnnnnnnnnnnnnnnnnnnnnnnnnnnnnnnnnnnnnnnnnnnnnnnnnnnnnnnnnnnnnnnnnnnnnnnnnnnnnnnnnnnnnnnnnnnnnnnnnnnnnnnnnnnnnnnnnnnnnnnnnnnnnnnnnnnnnnnnnnnnnnnnnnnnnnnnnnnnnnnnnnnnnnnnnnnnnnnnnnnnnnnnnnnnnnnnnnnnnnnnnnnnnnnnnnnnnnnnnnnnnnnnnnnnnnnnnnnnnnnnnnnnnnnnnnnnnnnnnnnnnnnnnnnnnnnnnnnnnnnnnnnnnnnnnnnnnnnnnnnnnnnnnnnnnnnnnnnnnnnnnnnnnnnnnnnnnnnnnnnnnnnnnnnnnnnnnnnnnnnnnnnnnnnnnnnnnnnnnnnnnnnnnnnnnnnnnnnnnnnnnnnnnnnnnnnnnnnnnnnnnnnnnnnnnnnnnnnnnnnnnnnnnnnnnnnnnnnnnnnnnnnnnnnnnnnnnnnnnnnnnnnnnnnnnnnnnnnnnnnnnnnnnnnnnnnnnnnnnnnnnnnnnnnnnnnnnnnnnnnnnnnnnnnnnnnnnnnnnnnnnnnnnnnnnnnnnnnnnnnnnnnnnnnnnnnnnnnnnnnnnnnnnnnnnnnnnnnnnnnnnnnnnnnnnnnnnnnnnnnnnnnnnnnnnnnnnnnnnnnnnnnnnnnnnnnnnnnnnnnnnnnnnnnnnnnnnnnnnnnnnnnnnnnnnnnnnnnnnnnnnnnnnnnnnnnnnnnnnnnnnnnnnnnnnnnnnnnnnnnnnnnnnnnnnnnnnnnnnnnnnnnnnnnnnnnnnnnnnnnnnnnnnnnnnnnnnnnnnnnnnnnnnnnnnnnnnnnnnnnnnnnnnnnnnnnnnnnnnnnnnnnnnnnnnnnnnnnnnnnnnnnnnnnnnnnnnnnnnnnnnnnnnnnnnnnnnnnnnnnnnnnnnnnnnnnnnnnnnnnnnnnnnnnnnnnnnnnnnnnnnnnnnnnnnnnnnnnnnnnnnnnnnnnnnnnnnnnnnnnnnnnnnnnnnnnnnnnnnnnnnnnnnnnnnnnnnnnnnnnnnnnnnnnnnnnnnnnnnnnnnnnnnnnnnnnnnnnnnnnnnnnnnnnnnnnnnnnnnnnnnnnnnnnnnnnnnnnnnnnnnnnnnnnnnnnnnnnnnnnnnnnnnnnnnnnnnnnnnnnnnnnnnnnnnnnnnnnnnnnnnnnnnnnnnnnnnnnnnnnnnnnnnnnnnnnnnnnnnnnnnnnnnnnnnnnnnnnnnnnnnnnnnnnnnnnnnnnnnnnnnnnnnnnnnnnnnnnnnnnnnnnnnnnnnnnnnnnnnnnnnnnnnnnnnnnnnnnnnnnnnnnnnnnnnnnnnnnnnnnnnnnnnnnnnnnnnnnnnnnnnnnnnnnnnnnnnnnnnnnnnnnnnnnnnnnnnnnnnnnnnnnnnnnnnnnnnnnnnnnnnnnnnnnnnnnnnnnnnnnnnnnnnnnnnnnnnnnnnnnnnnnnnnnnnnnnnnnnnnnnnnnnnnnnnnnnnnnnnnnnnnnnnnnnnnnnnnnnnnnnnnnnnnnnnnnnnnnnnnnnnnnnnnnnnnnnnnnnnnnnnnnnnnnnnnnnnnnnnnnnnnnnnnnnnnnnnnnnnnnnnnnnnnnnnnnnnnnnnnnnnnnnnnnnnnnnnnnnnnnnnnnnnnnnnnnnnnnnnnnnnnnnnnnnnnnnnnnnnnnnnnnnnnnnnnnnnnnnnnnnnnnnnnnnnnnnnnnnnnnnnnnnnnnnnnnnnnnnnnnnnnnnnnnnnnnnnnnnnnnnnnnnnnnnnnnnnnnnnnnnnnnnnnnnnnnnnnnnnnnnnnnnnnnnnnnnnnnnnnnnnnnnnnnnnnnnnnnnnnnnnnnnnnnnnnnnnnnnnnnnnnnnnnnnnnnnnnnnnnnnnnnnnnnnnnnnnnnnnnnnnnnnnnnnnnnnnnnnnnnnnnnnnnnnnnnnnnnnnnnnnnnnnnnnnnnnnnnnnnnnnnnnnnnnnnnnnnnnnnnnnnnnnnnnnnnnnnnnnnnnnnnnnnnnnnnnnnnnnnnnnnnnnnnnnnnnnnnnnnnnnnnnnnnnnnnnnnnnnnnnnnnnnnnnnnnnnnnnnnnnnnnnnnnnnnnnnnnnnnnnnnnnnnnnnnnnnnnnnnnnnnnnnnnnnnnnnnnnnnnnnnnnnnnnnnnnnnnnnnnnnnnnnnnnnnnnnnnnnnnnnnnnnnnnnnnnnnnnnnnnnnnnnnnnnnnnnnnnnnnnnnnnnnnnnnnnnnnnnnnnnnnnnnnnnnnnnnnnnnnnnnnnnnnnnnnnnnnnnnnnnnnnnnnnnnnnnnnnnnnnnnnnnnnnnnnnnnnnnnnnnnnnnnnnnnnnnnnnnnnnnnnnnnnnnnnnnnnnnnnnnnnnnnnnnnnnnnnnnnnnnnnnnnnnnnnnnnnnnnnnnnnnnnnnnnnnnnnnnnnnnnnnnnnnnnnnnnnnnnnnnnnnnnnnnnnnnnnnnnnnnnnnnnnnnnnnnnnnnnnnnnnnnnnnnnnnnnnnnnnnnnnnnnnnnnnnnnnnnnnnnnnnnnnnnnnnnnnnnnnnnnnnnnnnnnnnnnnnnnnnnnnnnnnnnnnnnnnnnnnnnnnnnnnnnnnnnnnnnnnnnnnnnnnnnnnnnnnnnnnnnnnnnnnnnnnnnnnnnnnnnnnnnnnnnnnnnnnnnnnnnnnnnnnnnnnnnnnnnnnnnnnnnnnnnnnnnnnnnnnnnnnnnnnnnnnnnnnnnnnnnnnnnnnnnnnnnnnnnnnnnnnnnnnnnnnnnnnnnnnnnnnnnnnnnnnnnnnnnnnnnnnnnnnnnnnnnnnnnnnnnnnnnnnnnnnnnnnnnnnnnnnnnnnnnnnnnnnnnnnnnnnnnnnnnnnnnnnnnnnnnnnnnnnnnnnnnnnnnnnnnnnnnnnnnnnnnnnnnnnnnnnnnnnnnnnnnnnnnnnnnnnnnnnnnnnnnnnnnnnnnnnnnnnnnnnnnnnnnnnnnnnnnnnnnnnnnnnnnnnnnnnnnnnnnnnnnnnnnnnnnnnnnnnnnnnnnnnnnnnnnnnnnnnnnnnnnnnnnnnnnnnnnnnnnnnnnnnnnnnnnnnnnnnnnnnnnnnnnnnnnnnnnnnnnnnnnnnnnnnnnnnnnnnnnnnnnnnnnnnnnnnnnnnnnnnnnnnnnnnnnnnnnnnnnnnnnnnnnnnnnnnnnnnnnnnnnnnnnnnnnnnnnnnnnnnnnnnnnnnnnnnnnnnnnnnnnnnnnnnnnnnnnnnnnnnnnnnnnnnnnnnnnnnnnnnnnnnnnnnnnnnnnnnnnnnnnnnnnnnnnnnnnnnnnnnnnnnnnnnnnnnnnnnnnnnnnnnnnnnnnnnnnnnnnnnnnnnnnnnnnnnnnnnnnnnnnnnnnnnnnnnnnnnnnnnnnnnnnnnnnnnnnnnnnnnnnnnnnnnnnnnnnnnnnnnnnnnnnnnnnnnnnnnnnnnnnnnnnnnnnnnnnnnnnnnnnnnnnnnnnnnnnnnnnnnnnnnnnnnnnnnnnnnnnnnnnnnnnnnnnnnnnnnnnnnnnnnnnnnnnnnnnnnnnnnnnnnnnnnnnnnnnnnnnnnnnnnnnnnnnnnnnnnnnnnnnnnnnnnnnnnnnnnnnnnnnnnnnnnnnnnnnnnnnnnnnnnnnnnnnnnnnnnnnnnnnnnnnnnnnnnnnnnnnnnnnnnnnnnnnnnnnnnnnnnnnnnnnnnnnnnnnnnnnnnnnnnnnnnnnnnnnnnnnnnnnnnnnnnnnnnnnnnnnnnnnnnnnnnnnnnnnnnnnnnnnnnnnnnnnnnnnnnnnnnnnnnnnnnnnnnnnnnnnnnnnnnnnnnnnnnnnnnnnnnnnnnnnnnnnnnnnnnnnnnnnnnnnnnnnnnnnnnnnnnnnnnnnnnnnnnnnnnnnnnnnnnnnnnnnnnnnnnnnnnnnnnnnnnnnnnnnnnnnnnnnnnnnnnnnnnnnnnnnnnnnnnnnnnnnnnnnnnnnnnnnnnnnnnnnnnnnnnnnnnnnnnnnnnnnnnnnnnnnnnnnnnnnnnnnnnnnnnnnnnnnnnnnnnnnnnnnnnnnnnnnnnnnnnnnnnnnnnnnnnnnnnnnnnnnnnnnnnnnnnnnnnnnnnnnnnnnnnnnnnnnnnnnnnnnnnnnnnnnnnnnnnnnnnnnnnnnnnnnnnnnnnnnnnnnnnnnnnnnnnnnnnnnnnnnnnnnnnnnnnnnnnnnnnnnnnnnnnnnnnnnnnnnnnnnnnnnnnnnnnnnnnnnnnnnnnnnnnnnnnnnnnnnnnnnnnnnnnnnnnnnnnnnnnnnnnnnnnnnnnnnnnnnnnnnnnnnnnnnnnnnnnnnnnnnnnnnnnnnnnnnnnnnnnnnnnnnnnnnnnnnnnnnnnnnnnnnnnnnnnnnnnnnnnnnnnnnnnnnnnnnnnnnnnnnnnnnnnnnnnnnnnnnnnnnnnnnnnnnnnnnnnnnnnnnnnnnnnnnnnnnnnnnnnnnnnnnnnnnnnnnnnnnnnnnnnnnnnnnnnnnnnnnnnnnnnnnnnnnnnnnnnnnnnnnnnnnnnnnnnnnnnnnnnnnnnnnnnnnnnnnnnnnnnnnnnnnnnnnnnnnnnnnnnnnnnnnnnnnnnnnnnnnnnnnnnnnnnnnnnnnnnnnnnnnnnnnnnnnnnnnnnnnnnnnnnnnnnnnnnnnnnnnnnnnnnnnnnnnnnnnnnnnnnnnnnnnnnnnnnnnnnnnnnnnnnnnnnnnnnnnnnnnnnnnnnnnnnnnnnnnnnnnnnnnnnnnnnnnnnnnnnnnnnnnnnnnnnnnnnnnnnnnnnnnnnnnnnnnnnnnnnnnnnnnnnnnnnnnnnnnnnnnnnnnnnnnnnnnnnnnnnnnnnnnnnnnnnnnnnnnnnnnnnnnnnnnnnnnnnnnnnnnnnnnnnnnnnnnnnnnnnnnnnnnnnnnnnnnnnnnnnnnnnnnnnnnnnnnnnnnnnnnnnnnnnnnnnnnnnnnnnnnnnnnnnnnnnnnnnnnnnnnnnnnnnnnnnnnnnnnnnnnnnnnnnnnnnnnnnnnnnnnnnnnnnnnnnnnnnnnnnnnnnnnnnnnnnnnnnnnnnnnnnnnnnnnnnnnnnnnnnnnnnnnnnnnnnnnnnnnnnnnnnnnnnnnnnnnnnnnnnnnnnnnnnnnnnnnnnnnnnnnnnnnnnnnnnnnnnnnnnnnnnnnnnnnnnnnnnnnnnnnnnnnnnnnnnnnnnnnnnnnnnnnnnnnnnnnnnnnnnnnnnnnnnnnnnnnnnnnnnnnnnnnnnnnnnnnnnnnnnnnnnnnnnnnnnnnnnnnnnnnnnnnnnnnnnnnnnnnnnnnnnnnnnnnnnnnnnnnnnnnnnnnnnnnnnnnnnnnnnnnnnnnnnnnnnnnnnnnnnnnnnnnnnnnnnnnnnnnnnnnnnnnnnnnnnnnnnnnnnnnnnnnnnnnnnnnnnnnnnnnnnnnnnnnnnnnnnnnnnnnnnnnnnnnnnnnnnnnnnnnnnnnnnnnnnnnnnnnnnnnnnnnnnnnnnnnnnnnnnnnnnnnnnnnnnnnnnnnnnnnnnnnnnnnnnnnnnnnnnnnnnnnnnnnnnnnnnnnnnnnnnnnnnnnnnnnnnnnnnnnnnnnnnnnnnnnnnnnnnnnnnnnnnnnnnnnnnnnnnnnnnnnnnnnnnnnnnnnnnnnnnnnnnnnnnnnnnnnnnnnnnnnnnnnnnnnnnnnnnnnnnnnnnnnnnnnnnnnnnnnnnnnnnnnnnnnnnnnnnnnnnnnnnnnnnnnnnnnnnnnnnnnnnnnnnnnnnnnnnnnnnnnnnnnnnnnnnnnnnnnnnnnnnnnnnnnnnnnnnnnnnnnnnnnnnnnnnnnnnnnnnnnnnnnnnnnnnnnnnnnnnnnnnnnnnnnnnnnnnnnnnnnnnnnnnnnnnnnnnnnnnnnnnnnnnnnnnnnnnnnnnnnnnnnnnnnnnnnnnnnnnnnnnnnnnnnnnnnnnnnnnnnnnnnnnnnnnnnnnnnnnnnnnnnnnnnnnnnnnnnnnnnnnnnnnnnnnnnnnnnnnnnnnnnnnnnnnnnnnnnnnnnnnnnnnnnnnnnnnnnnnnnnnnnnnnnnnnnnnnnnnnnnnnnnnnnnnnnnnnnnnnnnnnnnnnnnnnnnnnnnnnnnnnnnnnnnnnnnnnnnnnnnnnnnnnnnnnnnnnnnnnnnnnnnnnnnnnnnnnnnnnnnnnnnnnnnnnnnnnnnnnnnnnnnnnnnnnnnnnnnnnnnnnnnnnnnnnnnnnnnnnnnnnnnnnnnnnnnnnnnnnnnnnnnnnnnnnnnnnnnnnnnnnnnnnnnnnnnnnnnnnnnnnnnnnnnnnnnnnnnnnnnnnnnnnnnnnnnnnnnnnnnnnnnnnnnnnnnnnnnnnnnnnnnnnnnnnnnnnnnnnnnnnnnnnnnnnnnnnnnnnnnnnnnnnnnnnnnnnnnnnnnnnnnnnnnnnnnnnnnnnnnnnnnnnnnnnnnnnnnnnnnnnnnnnnnnnnnnnnnnnnnnnnnnnnnnnnnnnnnnnnnnnnnnnnnnnnnnnnnnnnnnnnnnnnnnnnnnnnnnnnnnnnnnnnnnnnnnnnnnnnnnnnnnnnnnnnnnnnnnnnnnnnnnnnnnnnnnnnnnnnnnnnnnnnnnnnnnnnnnnnnnnnnnnnnnnnnnnnnnnnnnnnnnnnnnnnnnnnnnnnnnnnnnnnnnnnnnnnnnnnnnnnnnnnnnnnnnnnnnnnnnnnnnnnnnnnnnnnnnnnnnnnnnnnnnnnnnnnnnnnnnnnnnnnnnnnnnnnnnnnnnnnnnnnnnnnnnnnnnnnnnnnnnnnnnnnnnnnnnnnnnnnnnnnnnnnnnnnnnnnnnnnnnnnnnnnnnnnnnnnnnnnnnnnnnnnnnnnnnnnnnnnnnnnnnnnnnnnnnnnnnnnnnnnnnnnnnnnnnnnnnnnnnnnnnnnnnnnnnnnnnnnnnnnnnnnnnnnnnnnnnnnnnnnnnnnnnnnnnnnnnnnnnnnnnnnnnnnnnnnnnnnnnnnnnnnnnnnnnnnnnnnnnnnnnnnnnnnnnnnnnnnnnnnnnnnnnnnnnnnnnnnnnnnnnnnnnnnnnnnnnnnnnnnnnnnnnnnnnnnnnnnnnnnnnnnnnnnnnnnnnnnnnnnnnnnnnnnnnnnnnnnnnnnnnnnnnnnnnnnnnnnnnnnnnnnnnnnnnnnnnnnnnnnnnnnnnnnnnnnnnnnnnnnnnnnnnnnnnnnnnnnnnnnnnnnnnnnnnnnnnnnnnnnnnnnnnnnnnnnnnnnnnnnnnnnnnnnnnnnnnnnnnnnnnnnnnnnnnnnnnnnnnnnnnnnnnnnnnnnnnnnnnnnnnnnnnnnnnnnnnnnnnnnnnnnnnnnnnnnnnnnnnnnnnnnnnnnnnnnnnnnnnnnnnnnnnnnnnnnnnnnnnnnnnnnnnnnnnnnnnnnnnnnnnnnnnnnnnnnnnnnnnnnnnnnnnnnnnnnnnnnnnnnnnnnnnnnnnnnnnnnnnnnnnnnnnnnnnnnnnnnnnnnnnnnnnnnnnnnnnnnnnnnnnnnnnnnnnnnnnnnnnnnnnnnnnnnnnnnnnnnnnnnnnnnnnnnnnnnnnnnnnnnnnnnnnnnnnnnnnnnnnnnnnnnnnnnnnnnnnnnnnnnnnnnnnnnnnnnnnnnnnnnnnnnnnnnnnnnnnnnnnnnnnnnnnnnnnnnnnnnnnnnnnnnnnnnnnnnnnnnnnnnnnnnnnnnnnnnnnnnnnnnnnnnnnnnnnnnnnnnnnnnnnnnnnnnnnnnnnnnnnnnnnnnnnnnnnnnnnnnnnnnnnnnnnnnnnnnnnnnnnnnnnnnnnnnnnnnnnnnnnnnnnnnnnnnnnnnnnnnnnnnnnnnnnnnnnnnnnnnnnnnnnnnnnnnnnnnnnnnnnnnnnnnnnnnnnnnnnnnnnnnnnnnnnnnnnnnnnnnnnnnnnnnnnnnnnnnnnnnnnnnnnnnnnnnnnnnnnnnnnnnnnnnnnnnnnnnnnnnnnnnnnnnnnnnnnnnnnnnnnnnnnnnnnnnnnnnnnnnnnnnnnnnnnnnnnnnnnnnnnnnnnnnnnnnnnnnnnnnnnnnnnnnnnnnnnnnnnnnnnnnnnnnnnnnnnnnnnnnnnnnnnnnnnnnnnnnnnnnnnnnnnnnnnnnnnnnnnnnnnnnnnnnnnnnnnnnnnnnnnnnnnnnnnnnnnnnnnnnnnnnnnnnnnnnnnnnnnnnnnnnnnnnnnnnnnnnnnnnnnnnnnnnnnnnnnnnnnnnnnnnnnnnnnnnnnnnnnnnnnnnnnnnnnnnnnnnnnnnnnnnnnnnnnnnnnnnnnnnnnnnnnnnnnnnnnnnnnnnnnnnnnnnnnnnnnnnnnnnnnnnnnnnnnnnnnnnnnnnnnnnnnnnnnnnnnnnnnnnnnnnnnnnnnnnnnnnnnnnnnnnnnnnnnnnnnnnnnnnnnnnnnnnnnnnnnnnnnnnnnnnnnnnnnnnnnnnnnnnnnnnnnnnnnnnnnnnnnnnnnnnnnnnnnnnnnnnnnnnnnnnnnnnnnnnnnnnnnnnnnnnnnnnnnnnnnnnnnnnnnnnnnnnnnnnnnnnnnnnnnnnnnnnnnnnnnnnnnnnnnnnnnnnnnnnnnnnnnnnnnnnnnnnnnnnnnnnnnnnnnnnnnnnnnnnnnnnnnnnnnnnnnnnnnnnnnnnnnnnnnnnnnnnnnnnnnnnnnnnnnnnnnnnnnnnnnnnnnnnnnnnnnnnnnnnnnnnnnnnnnnnnnnnnnnnnnnnnnnnnnnnnnnnnnnnnnnnnnnnnnnnnnnnnnnnnnnnnnnnnnnnnnnnnnnnnnnnnnnnnnnnnnnnnnnnnnnnnnnnnnnnnnnnnnnnnnnnnnnnnnnnnnnnnnnnnnnnnnnnnnnnnnnnnnnnnnnnnnnnnnnnnnnnnnnnnnnnnnnnnnnnnnnnnnnnnnnnnnnnnnnnnnnnnnnnnnnnnnnnnnnnnnnnnnnnnnnnnnnnnnnnnnnnnnnnnnnnnnnnnnnnnnnnnnnnnnnnnnnnnnnnnnnnnnnnnnnnnnnnnnnnnnnnnnnnnnnnnnnnnnnnnnnnnnnnnnnnnnnnnnnnnnnnnnnnnnnnnnnnnnnnnnnnnnnnnnnnnnnnnnnnnnnnnnnnnnnnnnnnnnnnnnnnnnnnnnnnnnnnnnnnnnnnnnnnnnnnnnnnnnnnnnnnnnnnnnnnnnnnnnnnnnnnnnnnnnnnnnnnnnnnnnnnnnnnnnnnnnnnnnnnnnnnnnnnnnnnnnnnnnnnnnnnnnnnnnnnnnnnnnnnnnnnnnnnnnnnnnnnnnnnnnnnnnnnnnnnnnnnnnnnnnnnnnnnnnnnnnnnnnnnnnnnnnnnnnnnnnnnnnnnnnnnnnnnnnnnnnnnnnnnnnnnnnnnnnnnnnnnnnnnnnnnnnnnnnnnnnnnnnnnnnnnnnnnnnnnnnnnnnnnnnnnnnnnnnnnnnnnnnnnnnnnnnnnnnnnnnnnnnnnnnnnnnnnnnnnnnnnnnnnnnnnnnnnnnnnnnnnnnnnnnnnnnnnnnnnnnnnnnnnnnnnnnnnnnnnnnnnnnnnnnnnnnnnnnnnnnnnnnnnnnnnnnnnnnnnnnnnnnnnnnnnnnnnnnnnnnnnnnnnnnnnnnnnnnnnnnnnnnnnnnnnnnnnnnnnnnnnnnnnnnnnnnnnnnnnnnnnnnnnnnnnnnnnnnnnnnnnnnnnnnnnnnnnnnnnnnnnnnnnnnnnnnnnnnnnnnnnnnnnnnnnnnnnnnnnnnnnnnnnnnnnnnnnnnnnnnnnnnnnnnnnnnnnnnnnnnnnnnnnnnnnnnnnnnnnnnnnnnnnnnnnnnnnnnnnnnnnnnnnnnnnnnnnnnnnnnnnnnnnnnnnnnnnnnnnnnnnnnnnnnnnnnnnnnnnnnnnnnnnnnnnnnnnnnnnnnnnnnnnnnnnnnnnnnnnnnnnnnnnnnnnnnnnnnnnnnnnnnnnnnnnnnnnnnnnnnnnnnnnnnnnnnnnnnnnnnnnnnnnnnnnnnnnnnnnnnnnnnnnnnnnnnnnnnnnnnnnnnnnnnnnnnnnnnnnnnnnnnnnnnnnnnnnnnnnnnnnnnnnnnnnnnnnnnnnnnnnnnnnnnnnnnnnnnnnnnnnnnnnnnnnnnnnnnnnnnnnnnnnnnnnnnnnnnnnnnnnnnnnnnnnnnnnnnnnnnnnnnnnnnnnnnnnnnnnnnnnnnnnnnnnnnnnnnnnnnnnnnnnnnnnnnnnnnnnnnnnnnnnnnnnnnnnnnnnnnnnnnnnnnnnnnnnnnnnnnnnnnnnnnnnnnnnnnnnnnnnnnnnnnnnnnnnnnnnnnnnnnnnnnnnnnnnnnnnnnnnnnnnnnnnnnnnnnnnnnnnnnnnnnnnnnnnnnnnnnnnnnnnnnnnnnnnnnnnnnnnnnnnnnnnnnnnnnnnnnnnnnnnnnnnnnnnnnnnnnnnnnnnnnnnnnnnnnnnnnnnnnnnnnnnnnnnnnnnnnnnnnnnnnnnnnnnnnnnnnnnnnnnnnnnnnnnnnnnnnnnnnnnnnnnnnnnnnnnnnnnnnnnnnnnnnnnnnnnnnnnnnnnnnnnnnnnnnnnnnnnnnnnnnnnnnnnnnnnnnnnnnnnnnnnnnnnnnnnnnnnnnnnnnnnnnnnnnnnnnnnnnnnnnnnnnnnnnnnnnnnnnnnnnnnnnnnnnnnnnnnnnnnnnnnnnnnnnnnnnnnnnnnnnnnnnnnnnnnnnnnnnnnnnnnnnnnnnnnnnnnnnnnnnnnnnnnnnnnnnnnnnnnnnnnnnnnnnnnnnnnnnnnnnnnnnnnnnnnnnnnnnnnnnnnnnnnnnnnnnnnnnnnnnnnnnnnnnnnnnnnnnnnnnnnnnnnnnnnnnnnnnnnnnnnnnnnnnnnnnnnnnnnnnnnnnnnnnnnnnnnnnnnnnnnnnnnnnnnnnnnnnnnnnnnnnnnnnnnnnnnnnnnnnnnnnnnnnnnnnnnnnnnnnnnnnnnnnnnnnnnnnnnnnnnnnnnnnnnnnnnnnnnnnnnnnnnnnnnnnnnnnnnnnnnnnnnnnnnnnnnnnnnnnnnnnnnnnnnnnnnnnnnnnnnnnnnnnnnnnnnnnnnnnnnnnnnnnnnnnnnnnnnnnnnnnnnnnnnnnnnnnnnnnnnnnnnnnnnnnnnnnnnnnnnnnnnnnnnnnnnnnnnnnnnnnnnnnnnnnnnnnnnnnnnnnnnnnnnnnnnnnnnnnnnnnnnnnnnnnnnnnnnnnnnnnnnnnnnnnnnnnnnnnnnnnnnnnnnnnnnnnnnnnnnnnnnnnnnnnnnnnnnnnnnnnnnnnnnnnnnnnnnnnnnnnnnnnnnnnnnnnnnnnnnnnnnnnnnnnnnnnnnnnnnnnnnnnnnnnnnnnnnnnnnnnnnnnnnnnnnnnnnnnnnnnnnnnnnnnnnnnnnnnnnnnnnnnnnnnnnnnnnnnnnnnnnnnnnnnnnnnnnnnnnnnnnnnnnnnnnnnnnnnnnnnnnnnnnnnnnnnnnnnnnnnnnnnnnnnnnnnnnnnnnnnnnnnnnnnnnnnnnnnnnnnnnnnnnnnnnnnnnnnnnnnnnnnnnnnnnnnnnnnnnnnnnnnnnnnnnnnnnnnnnnnnnnnnnnnnnnnnnnnnnnnnnnnnnnnnnnnnnnnnnnnnnnnnnnnnnnnnnnnnnnnnnnnnnnnnnnnnnnnnnnnnnnnnnnnnnnnnnnnnnnnnnnnnnnnnnnnnnnnnnnnnnnnnnnnnnnnnnnnnnnnnnnnnnnnnnnnnnnnnnnnnnnnnnnnnnnnnnnnnnnnnnnnnnnnnnnnnnnnnnnnnnnnnnnnnnnnnnnnnnnnnnnnnnnnnnnnnnnnnnnnnnnnnnnnnnnnnnnnnnnnnnnnnnnnnnnnnnnnnnnnnnnnnnnnnnnnnnnnnnnnnnnnnnnnnnnnnnnnnnnnnnnnnnnnnnnnnnnnnnnnnnnnnnnnnnnnnnnnnnnnnnnnnnnnnnnnnnnnnnnnnnnnnnnnnnnnnnnnnnnnnnnnnnnnnnnnnnnnnnnnnnnnnnnnnnnnnnnnnnnnnnnnnnnnnnnnnnnnnnnnnnnnnnnnnnnnnnnnnnnnnnnnnnnnnnnnnnnnnnnnnnnnnnnnnnnnnnnnnnnnnnnnnnnnnnnnnnnnnnnnnnnnnnnnnnnnnnnnnnnnnnnnnnnnnnnnnnnnnnnnnnnnnnnnnnnnnnnnnnnnnnnnnnnnnnnnnnnnnnnnnnnnnnnnnnnnnnnnnnnnnnnnnnnnnnnnnnnnnnnnnnnnnnnnnnnnnnnnnnnnnnnnnnnnnnnnnnnnnnnnnnnnnnnnnnnnnnnnnnnnnnnnnnnnnnnnnnnnnnnnnnnnnnnnnnnnnnnnnnnnnnnnnnnnnnnnnnnnnnnnnnnnnnnnnnnnnnnnnnnnnnnnnnnnnnnnnnnnnnnnnnnnnnnnnnnnnnnnnnnnnnnnnnnnnnnnnnnnnnnnnnnnnnnnnnnnnnnnnnnnnnnnnnnnnnnnnnnnnnnnnnnnnnnnnnnnnnnnnnnnnnnnnnnnnnnnnnnnnnnnnnnnnnnnnnnnnnnnnnnnnnnnnnnnnnnnnnnnnnnnnnnnnnnnnnnnnnnnnnnnnnnnnnnnnnnnnnnnnnnnnnnnnnnnnnnnnnnnnnnnnnnnnnnnnnnnnnnnnnnnnnnnnnnnnnnnnnnnnnnnnnnnnnnnnnnnnnnnnnnnnnnnnnnnnnnnnnnnnnnnnnnnnnnnnnnnnnnnnnnnnnnnnnnnnnnnnnnnnnnnnnnnnnnnnnnnnnnnnnnnnnnnnnnnnnnnnnnnnnnnnnnnnnnnnnnnnnnnnnnnnnnnnnnnnnnnnnnnnnnnnnnnnnnnnnnnnnnnnnnnnnnnnnnnnnnnnnnnnnnnnnnnnnnnnnnnnnnnnnnnnnnnnnnnnnnnnnnnnnnnnnnnnnnnnnnnnnnnnnnnnnnnnnnnnnnnnnnnnnnnnnnnnnnnnnnnnnnnnnnnnnnnnnnnnnnnnnnnnnnnnnnnnnnnnnnnnnnnnnnnnnnnnnnnnnnnnnnnnnnnnnnnnnnnnnnnnnnnnnnnnnnnnnnnnnnnnnnnnnnnnnnnnnnnnnnnnnnnnnnnnnnnnnnnnnnnnnnnnnnnnnnnnnnnnnnnnnnnnnnnnnnnnnnnnnnnnnnnnnnnnnnnnnnnnnnnnnnnnnnnnnnnnnnnnnnnnnnnnnnnnnnnnnnnnnnnnnnnnnnnnnnnnnnnnnnnnnnnnnnnnnnnnnnnnnnnnnnnnnnnnnnnnnnnnnnnnnnnnnnnnnnnnnnnnnnnnnnnnnnnnnnnnnnnnnnnnnnnnnnnnnnnnnnnnnnnnnnnnnnnnnnnnnnnnnnnnnnnnnnnnnnnnnnnnnnnnnnnnnnnnnnnnnnnnnnnnnnnnnnnnnnnnnnnnnnnnnnnnnnnnnnnnnnnnnnnnnnnnnnnnnnnnnnnnnnnnnnnnnnnnnnnnnnnnnnnnnnnnnnnnnnnnnnnnnnnnnnnnnnnnnnnnnnnnnnnnnnnnnnnnnnnnnnnnnnnnnnnnnnnnnnnnnnnnnnnnnnnnnnnnnnnnnnnnnnnnnnnnnnnnnnnnnnnnnnnnnnnnnnnnnnnnnnnnnnnnnnnnnnnnnnnnnnnnnnnnnnnnnnnnnnnnnnnnnnnnnnnnnnnnnnnnnnnnnnnnnnnnnnnnnnnnnnnnnnnnnnnnnnnnnnnnnnnnnnnnnnnnnnnnnnnnnnnnnnnnnnnnnnnnnnnnnnnnnnnnnnnnnnnnnnnnnnnnnnnnnnnnnnnnnnnnnnnnnnnnnnnnnnnnnnnnnnnnnnnnnnnnnnnnnnnnnnnnnnnnnnnnnnnnnnnnnnnnnnnnnnnnnnnnnnnnnnnnnnnnnnnnnnnnnnnnnnnnnnnnnnnnnnnnnnnnnnnnnnnnnnnnnnnnnnnnnnnnnnnnnnnnnnnnnnnnnnnnnnnnnnnnnnnnnnnnnnnnnnnnnnnnnnnnnnnnnnnnnnnnnnnnnnnnnnnnnnnnnnnnnnnnnnnnnnnnnnnnnnnnnnnnnnnnnnnnnnnnnnnnnnnnnnnnnnnnnnnnnnnnnnnnnnnnnnnnnnnnnnnnnnnnnnnnnnnnnnnnnnnnnnnnnnnnnnnnnnnnnnnnnnnnnnnnnnnnnnnnnnnnnnnnnnnnnnnnnnnnnnnnnnnnnnnnnnnnnnnnnnnnnnnnnnnnnnnnnnnnnnnnnnnnnnnnnnnnnnnnnnnnnnnnnnnnnnnnnnnnnnnnnnnnnnnnnnnnnnnnnnnnnnnnnnnnnnnnnnnnnnnnnnnnnnnnnnnnnnnnnnnnnnnnnnnnnnnnnnnnnnnnnnnnnnnnnnnnnnnnnnnnnnnnnnnnnnnnnnnnnnnnnnnnnnnnnnnnnnnnnnnnnnnnnnnnnnnnnnnnnnnnnnnnnnnnnnnnnnnnnnnnnnnnnnnnnnnnnnnnnnnnnnnnnnnnnnnnnnnnnnnnnnnnnnnnnnnnnnnnnnnnnnnnnnnnnnnnnnnnnnnnnnnnnnnnnnnnnnnnnnnnnnnnnnnnnnnnnnnnnnnnnnnnnnnnnnnnnnnnnnnnnnnnnnnnnnnnnnnnnnnnnnnnnnnnnnnnnnnnnnnnnnnnnnnnnnnnnnnnnnnnnnnnnnnnnnnnnnnnnnnnnnnnnnnnnnnnnnnnnnnnnnnnnnnnnnnnnnnnnnnnnnnnnnnnnnnnnnnnnnnnnnnnnnnnnnnnnnnnnnnnnnnnnnnnnnnnnnnnnnnnnnnnnnnnnnnnnnnnnnnnnnnnnnnnnnnnnnnnnnnnnnnnnnnnnnnnnnnnnnnnnnnnnnnnnnnnnnnnnnnnnnnnnnnnnnnnnnnnnnnnnnnnnnnnnnnnnnnnnnnnnnnnnnnnnnnnnnnnnnnnnnnnnnnnnnnnnnnnnnnnnnnnnnnnnnnnnnnnnnnnnnnnnnnnnnnnnnnnnnnnnnnnnnnnnnnnnnnnnnnnnnnnnnnnnnnnnnnnnnnnnnnnnnnnnnnnnnnnnnnnnnnnnnnnnnnnnnnnnnnnnnnnnnnnnnnnnnnnnnnnnnnnnnnnnnnnnnnnnnnnnnnnnnnnnnnnnnnnnnnnnnnnnnnnnnnnnnnnnnnnnnnnnnnnnnnnnnnnnnnnnnnnnnnnnnnnnnnnnnnnnnnnnnnnnnnnnnnnnnnnnnnnnnnnnnnnnnnnnnnnnnnnnnnnnnnnnnnnnnnnnnnnnnnnnnnnnnnnnnnnnnnnnnnnnnnnnnnnnnnnnnnnnnnnnnnnnnnnnnnnnnnnnnnnnnnnnnnnnnnnnnnnnnnnnnnnnnnnnnnnnnnnnnnnnnnnnnnnnnnnnnnnnnnnnnnnnnnnnnnnnnnnnnnnnnnnnnnnnnnnnnnnnnnnnnnnnnnnnnnnnnnnnnnnnnnnnnnnnnnnnnnnnnnnnnnnnnnnnnnnnnnnnnnnnnnnnnnnnnnnnnnnnnnnnnnnnnnnnnnnnnnnnnnnnnnnnnnnnnnnnnnnnnnnnnnnnnnnnnnnnnnnnnnnnnnnnnnnnnnnnnnnnnnnnnnnnnnnnnnnnnnnnnnnnnnnnnnnnnnnnnnnnnnnnnnnnnnnnnnnnnnnnnnnnnnnnnnnnnnnnnnnnnnnnnnnnnnnnnnnnnnnnnnnnnnnnnnnnnnnnnnnnnnnnnnnnnnnnnnnnnnnnnnnnnnnnnnnnnnnnnnnnnnnnnnnnnnnnnnnnnnnnnnnnnnnnnnnnnnnnnnnnnnnnnnnnnnnnnnnnnnnnnnnnnnnnnnnnnnnnnnnnnnnnnnnnnnnnnnnnnnnnnnnnnnnnnnnnnnnnnnnnnnnnnnnnnnnnnnnnnnnnnnnnnnnnnnnnnnnnnnnnnnnnnnnnnnnnnnnnnnnnnnnnnnnnnnnnnnnnnnnnnnnnnnnnnnnnnnnnnnnnnnnnnnnnnnnnnnnnnnnnnnnnnnnnnnnnnnnnnnnnnnnnnnnnnnnnnnnnnnnnnnnnnnnnnnnnnnnnnnnnnnnnnnnnnnnnnnnnnnnnnnnnnnnnnnnnnnnnnnnnnnnnnnnnnnnnnnnnnnnnnnnnnnnnnnnnnnnnnnnnnnnnnnnnnnnnnnnnnnnnnnnnnnnnnnnnnnnnnnnnnnnnnnnnnnnnnnnnnnnnnnnnnnnnnnnnnnnnnnnnnnnnnnnnnnnnnnnnnnnnnnnnnnnnnnnnnnnnnnnnnnnnnnnnnnnnnnnnnnnnnnnnnnnnnnnnnnnnnnnnnnnnnnnnnnnnnnnnnnnnnnnnnnnnnnnnnnnnnnnnnnnnnnnnnnnnnnnnnnnnnnnnnnnnnnnnnnnnnnnnnnnnnnnnnnnnnnnnnnnnnnnnnnnnnnnnnnnnnnnnnnnnnnnnnnnnnnnnnnnnnnnnnnnnnnnnnnnnnnnnnnnnnnnnnnnnnnnnnnnnnnnnnnnnnnnnnnnnnnnnnnnnnnnnnnnnnnnnnnnnnnnnnnnnnnnnnnnnnnnnnnnnnnnnnnnnnnnnnnnnnnnnnnnnnnnnnnnnnnnnnnnnnnnnnnnnnnnnnnnnnnnnnnnnnnnnnnnnnnnnnnnnnnnnnnnnnnnnnnnnnnnnnnnnnnnnnnnnnnnnnnnnnnnnnnnnnnnnnnnnnnnnnnnnnnnnnnnnnnnnnnnnnnnnnnnnnnnnnnnnnnnnnnnnnnnnnnnnnnnnnnnnnnnnnnnnnnnnnnnnnnnnnnnnnnnnnnnnnnnnnnnnnnnnnnnnnnnnnnnnnnnnnnnnnnnnnnnnnnnnnnnnnnnnnnnnnnnnnnnnnnnnnnnnnnnnnnnnnnnnnnnnnnnnnnnnnnnnnnnnnnnnnnnnnnnnnnnnnnnnnnnnnnnnnnnnnnnnnnnnnnnnnnnnnnnnnnnnnnnnnnnnnnnnnnnnnnnnnnnnnnnnnnnnnnnnnnnnnnnnnnnnnnnnnnnnnnnnnnnnnnnnnnnnnnnnnnnnnnnnnnnnnnnnnnnnnnnnnnnnnnnnnnnnnnnnnnnnnnnnnnnnnnnnnnnnnnnnnnnnnnnnnnnnnnnnnnnnnnnnnnnnnnnnnnnnnnnnnnnnnnnnnnnnnnnnnnnnnnnnnnnnnnnnnnnnnnnnnnnnnnnnnnnnnnnnnnnnnnnnnnnnnnnnnnnnnnnnnnnnnnnnnnnnnnnnnnnnnnnnnnnnnnnnnnnnnnnnnnnnnnnnnnnnnnnnnnnnnnnnnnnnnnnnnnnnnnnnnnnnnnnnnnnnnnnnnnnnnnnnnnnnnnnnnnnnnnnnnnnnnnnnnnnnnnnnnnnnnnnnnnnnnnnnnnnnnnnnnnnnnnnnnnnnnnnnnnnnnnnnnnnnnnnnnnnnnnnnnnnnnnnnnnnnnnnnnnnnnnnnnnnnnnnnnnnnnnnnnnnnnnnnnnnnnnnnnnnnnnnnnnnnnnnnnnnnnnnnnnnnnnnnnnnnnnnnnnnnnnnnnnnnnnnnnnnnnnnnnnnnnnnnnnnnnnnnnnnnnnnnnnnnnnnnnnnnnnnnnnnnnnnnnnnnnnnnnnnnnnnnnnnnnnnnnnnnnnnnnnnnnnnnnnnnnnnnnnnnnnnnnnnnnnnnnnnnnnnnnnnnnnnnnnnnnnnnnnnnnnnnnnnnnnnnnnnnnnnnnnnnnnnnnnnnnnnnnnnnnnnnnnnnnnnnnnnnnnnnnnnnnnnnnnnnnnnnnnnnnnnnnnnnnnnnnnnnnnnnnnnnnnnnnnnnnnnnnnnnnnnnnnnnnnnnnnnnnnnnnnnnnnnnnnnnnnnnnnnnnnnnnnnnnnnnnnnnnnnnnnnnnnnnnnnnnnnnnnnnnnnnnnnnnnnnnnnnnnnnnnnnnnnnnnnnnnnnnnnnnnnnnnnnnnnnnnnnnnnnnnnnnnnnnnnnnnnnnnnnnnnnnnnnnnnnnnnnnnnnnnnnnnnnnnnnnnnnnnnnnnnnnnnnnnnnnnnnnnnnnnnnnnnnnnnnnnnnnnnnnnnnnnnnnnnnnnnnnnnnnnnnnnnnnnnnnnnnnnnnnnnnnnnnnnnnnnnnnnnnnnnnnnnnnnnnnnnnnnnnnnnnnnnnnnnnnnnnnnnnnnnnnnnnnnnnnnnnnnnnnnnnnnnnnnnnnnnnnnnnnnnnnnnnnnnnnnnnnnnnnnnnnnnnnnnnnnnnnnnnnnnnnnnnnnnnnnnnnnnnnnnnnnnnnnnnnnnnnnnnnnnnnnnnnnnnnnnnnnnnnnnnnnnnnnnnnnnnnnnnnnnnnnnnnnnnnnnnnnnnnnnnnnnnnnnnnnnnnnnnnnnnnnnnnnnnnnnnnnnnnnnnnnnnnnnnnnnnnnnnnnnnnnnnnnnnnnnnnnnnnnnnnnnnnnnnnnnnnnnnnnnnnnnnnnnnnnnnnnnnnnnnnnnnnnnnnnnnnnnnnnnnnnnnnnnnnnnnnnnnnnnnnnnnnnnnnnnnnnnnnnnnnnnnnnnnnnnnnnnnnnnnnnnnnnnnnnnnnnnnnnnnnnnnnnnnnnnnnnnnnnnnnnnnnnnnnnnnnnnnnnnnnnnnnnnnnnnnnnnnnnnnnnnnnnnnnnnnnnnnnnnnnnnnnnnnnnnnnnnnnnnnnnnnnnnnnnnnnnnnnnnnnnnnnnnnnnnnnnnnnnnnnnnnnnnnnnnnnnnnnnnnnnnnnnnnnnnnnnnnnnnnnnnnnnnnnnnnnnnnnnnnnnnnnnnnnnnnnnnnnnnnnnnnnnnnnnnnnnnnnnnnnnnnnnnnnnnnnnnnnnnnnnnnnnnnnnnnnnnnnnnnnnnnnnnnnnnnnnnnnnnnnnnnnnnnnnnnnnnnnnnnnnnnnnnnnnnnnnnnnnnnnnnnnnnnnnnnnnnnnnnnnnnnnnnnnnnnnnnnnnnnnnnnnnnnnnnnnnnnnnnnnnnnnnnnnnnnnnnnnnnnnnnnnnnnnnnnnnnnnnnnnnnnnnnnnnnnnnnnnnnnnnnnnnnnnnnnnnnnnnnnnnnnnnnnnnnnnnnnnnnnnnnnnnnnnnnnnnnnnnnnnnnnnnnnnnnnnnnnnnnnnnnnnnnnnnnnnnnnnnnnnnnnnnnnnnnnnnnnnnnnnnnnnnnnnnnnnnnnnnnnnnnnnnnnnnnnnnnnnnnnnnnnnnnnnnnnnnnnnnnnnnnnnnnnnnnnnnnnnnnnnnnnnnnnnnnnnnnnnnnnnnnnnnnnnnnnnnnnnnnnnnnnnnnnnnnnnnnnnnnnnnnnnnnnnnnnnnnnnnnnnnnnnnnnnnnnnnnnnnnnnnnnnnnnnnnnnnnnnnnnnnnnnnnnnnnnnnnnnnnnnnnnnnnnnnnnnnnnnnnnnnnnnnnnnnnnnnnnnnnnnnnnnnnnnnnnnnnnnnnnnnnnnnnnnnnnnnnnnnnnnnnnnnnnnnnnnnnnnnnnnnnnnnnnnnnnnnnnnnnnnnnnnnnnnnnnnnnnnnnnnnnnnnnnnnnnnnnnnnnnnnnnnnnnnnnnnnnnnnnnnnnnnnnnnnnnnnnnnnnnnnnnnnnnnnnnnnnnnnnnnnnnnnnnnnnnnnnnnnnnnnnnnnnnnnnnnnnnnnnnnnnnnnnnnnnnnnnnnnnnnnnnnnnnnnnnnnnnnnnnnnnnnnnnnnnnnnnnnnnnnnnnnnnnnnnnnnnnnnnnnnnnnnnnnnnnnnnnnnnnnnnnnnnnnnnnnnnnnnnnnnnnnnnnnnnnnnnnnnnnnnnnnnnnnnnnnnnnnnnnnnnnnnnnnnnnnnnnnnnnnnnnnnnnnnnnnnnnnnnnnnnnnnnnnnnnnnnnnnnnnnnnnnnnnnnnnnnnnnnnnnnnnnnnnnnnnnnnnnnnnnnnnnnnnnnnnnnnnnnnnnnnnnnnnnnnnnnnnnnnnnnnnnnnnnnnnnnnnnnnnnnnnnnnnnnnnnnnnnnnnnnnnnnnnnnnnnnnnnnnnnnnnnnnnnnnnnnnnnnnnnnnnnnnnnnnnnnnnnnnnnnnnnnnnnnnnnnnnnnnnnnnnnnnnnnnnnnnnnnnnnnnnnnnnnnnnnnnnnnnnnnnnnnnnnnnnnnnnnnnnnnnnnnnnnnnnnnnnnnnnnnnnnnnnnnnnnnnnnnnnnnnnnnnnnnnnnnnnnnnnnnnnnnnnnnnnnnnnnnnnnnnnnnnnnnnnnnnnnnnnnnnnnnnnnnnnnnnnnnnnnnnnnnnnnnnnnnnnnnnnnnnnnnnnnnnnnnnnnnnnnnnnnnnnnnnnnnnnnnnnnnnnnnnnnnnnnnnnnnnnnnnnnnnnnnnnnnnnnnnnnnnnnnnnnnnnnnnnnnnnnnnnnnnnnnnnnnnnnnnnnnnnnnnnnnnnnnnnnnnnnnnnnnnnnnnnnnnnnnnnnnnnnnnnnnnnnnnnnnnnnnnnnnnnnnnnnnnnnnnnnnnnnnnnnnnnnnnnnnnnnnnnnnnnnnnnnnnnnnnnnnnnnnnnnnnnnnnnnnnnnnnnnnnnnnnnnnnnnnnnnnnnnnnnnnnnnnnnnnnnnnnnnnnnnnnnnnnnnnnnnnnnnnnnnnnnnnnnnnnnnnnnnnnnnnnnnnnnnnnnnnnnnnnnnnnnnnnnnnnnnnnnnnnnnnnnnnnnnnnnnnnnnnnnnnnnnnnnnnnnnnnnnnnnnnnnnnnnnnnnnnnnnnnnnnnnnnnnnnnnnnnnnnnnnnnnnnnnnnnnnnnnnnnnnnnnnnnnnnnnnnnnnnnnnnnnnnnnnnnnnnnnnnnnnnnnnnnnnnnnnnnnnnnnnnnnnnnnnnnnnnnnnnnnnnnnnnnnnnnnnnnnnnnnnnnnnnnnnnnnnnnnnnnnnnnnnnnnnnnnnnnnnnnnnnnnnnnnnnnnnnnnnnnnnnnnnnnnnnnnnnnnnnnnnnnnnnnnnnnnnnnnnnnnnnnnnnnnnnnnnnnnnnnnnnnnnnnnnnnnnnnnnnnnnnnnnnnnnnnnnnnnnnnnnnnnnnnnnnnnnnnnnnnnnnnnnnnnnnnnnnnnnnnnnnnnnnnnnnnnnnnnnnnnnnnnnnnnnnnnnnnnnnnnnnnnnnnnnnnnnnnnnnnnnnnnnnnnnnnnnnnnnnnnnnnnnnnnnnnnnnnnnnnnnnnnnnnnnnnnnnnnnnnnnnnnnnnnnnnnnnnnnnnnnnnnnnnnnnnnnnnnnnnnnnnnnnnnnnnnnnnnnnnnnnnnnnnnnnnnnnnnnnnnnnnnnnnnnnnnnnnnnnnnnnnnnnnnnnnnnnnnnnnnnnnnnnnnnnnnnnnnnnnnnnnnnnnnnnnnnnnnnnnnnnnnnnnnnnnnnnnnnnnnnnnnnnnnnnnnnnnnnnnnnnnnnnnnnnnnnnnnnnnnnnnnnnnnnnnnnnnnnnnnnnnnnnnnnnnnnnnnnnnnnnnnnnnnnnnnnnnnnnnnnnnnnnnnnnnnnnnnnnnnnnnnnnnnnnnnnnnnnnnnnnnnnnnnnnnnnnnnnnnnnnnnnnnnnnnnnnnnnnnnnnnnnnnnnnnnnnnnnnnnnnnnnnnnnnnnnnnnnnnnnnnnnnnnnnnnnnnnnnnnnnnnnnnnnnnnnnnnnnnnnnnnnnnnnnnnnnnnnnnnnnnnnnnnnnnnnnnnnnnnnnnnnnnnnnnnnnnnnnnnnnnnnnnnnnnnnnnnnnnnnnnnnnnnnnnnnnnnnnnnnnnnnnnnnnnnnnnnnnnnnnnnnnnnnnnnnnnnnnnnnnnnnnnnnnnnnnnnnnnnnnnnnnnnnnnnnnnnnnnnnnnnnnnnnnnnnnnnnnnnnnnnnnnnnnnnnnnnnnnnnnnnnnnnnnnnnnnnnnnnnnnnnnnnnnnnnnnnnnnnnnnnnnnnnnnnnnnnnnnnnnnnnnnnnnnnnnnnnnnnnnnnnnnnnnnnnnnnnnnnnnnnnnnnnnnnnnnnnnnnnnnnnnnnnnnnnnnnnnnnnnnnnnnnnnnnnnnnnnnnnnnnnnnnnnnnnnnnnnnnnnnnnnnnnnnnnnnnnnnnnnnnnnnnnnnnnnnnnnnnnnnnnnnnnnnnnnnnnnnnnnnnnnnnnnnnnnnnnnnnnnnnnnnnnnnnnnnnnnnnnnnnnnnnnnnnnnnnnnnnnnnnnnnnnnnnnnnnnnnnnnnnnnnnnnnnnnnnnnnnnnnnnnnnnnnnnnnnnnnnnnnnnnnnnnnnnnnnnnnnnnnnnnnnnnnnnnnnnnnnnnnnnnnnnnnnnnnnnnnnnnnnnnnnnnnnnnnnnnnnnnnnnnnnnnnnnnnnnnnnnnnnnnnnnnnnnnnnnnnnnnnnnnnnnnnnnnnnnnnnnnnnnnnnnnnnnnnnnnnnnnnnnnnnnnnnnnnnnnnnnnnnnnnnnnnnnnnnnnnnnnnnnnnnnnnnnnnnnnnnnnnnnnnnnnnnnnnnnnnnnnnnnnnnnnnnnnnnnnnnnnnnnnnnnnnnnnnnnnnnnnnnnnnnnnnnnnnnnnnnnnnnnnnnnnnnnnnnnnnnnnnnnnnnnnnnnnnnnnnnnnnnnnnnnnnnnnnnnnnnnnnnnnnnnnnnnnnnnnnnnnnnnnnnnnnnnnnnnnnnnnnnnnnnnnnnnnnnnnnnnnnnnnnnnnnnnnnnnnnnnnnnnnnnnnnnnnnnnnnnnnnnnnnnnnnnnnnnnnnnnnnnnnnnnnnnnnnnnnnnnnnnnnnnnnnnnnnnnnnnnnnnnnnnnnnnnnnnnnnnnnnnnnnnnnnnnnnnnnnnnnnnnnnnnnnnnnnnnnnnnnnnnnnnnnnnnnnnnnnnnnnnnnnnnnnnnnnnnnnnnnnnnnnnnnnnnnnnnnnnnnnnnnnnnnnnnnnnnnnnnnnnnnnnnnnnnnnnnnnnnnnnnnnnnnnnnnnnnnnnnnnnnnnnnnnnnnnnnnnnnnnnnnnnnnnnnnnnnnnnnnnnnnnnnnnnnnnnnnnnnnnnnnnnnnnnnnnnnnnnnnnnnnnnnnnnnnnnnnnnnnnnnnnnnnnnnnnnnnnnnnnnnnnnnnnnnnnnnnnnnnnnnnnnnnnnnnnnnnnnnnnnnnnnnnnnnnnnnnnnnnnnnnnnnnnnnnnnnnnnnnnnnnnnnnnnnnnnnnnnnnnnnnnnnnnnnnnnnnnnnnnnnnnnnnnnnnnnnnnnnnnnnnnnnnnnnnnnnnnnnnnnnnnnnnnnnnnnnnnnnnnnnnnnnnnnnnnnnnnnnnnnnnnnnnnnnnnnnnnnnnnnnnnnnnnnnnnnnnnnnnnnnnnnnnnnnnnnnnnnnnnnnnnnnnnnnnnnnnnnnnnnnnnnnnnnnnnnnnnnnnnnnnnnnnnnnnnnnnnnnnnnnnnnnnnnnnnnnnnnnnnnnnnnnnnnnnnnnnnnnnnnnnnnnnnnnnnnnnnnnnnnnnnnnnnnnnnnnnnnnnnnnnnnnnnnnnnnnnnnnnnnnnnnnnnnnnnnnnnnnnnnnnnnnnnnnnnnnnnnnnnnnnnnnnnnnnnnnnnnnnnnnnnnnnnnnnnnnnnnnnnnnnnnnnnnnnnnnnnnnnnnnnnnnnnnnnnnnnnnnnnnnnnnnnnnnnnnnnnnnnnnnnnnnnnnnnnnnnnnnnnnnnnnnnnnnnnnnnnnnnnnnnnnnnnnnnnnnnnnnnnnnnnnnnnnnnnnnnnnnnnnnnnnnnnnnnnnnnnnnnnnnnnnnnnnnnnnnnnnnnnnnnnnnnnnnnnnnnnnnnnnnnnnnnnnnnnnnnnnnnnnnnnnnnnnnnnnnnnnnnnnnnnnnnnnnnnnnnnnnnnnnnnnnnnnnnnnnnnnnnnnnnnnnnnnnnnnnnnnnnnnnnnnnnnnnnnnnnnnnnnnnnnnnnnnnnnnnnnnnnnnnnnnnnnnnnnnnnnnnnnnnnnnnnnnnnnnnnnnnnnnnnnnnnnnnnnnnnnnnnnnnnnnnnnnnnnnnnnnnnnnnnnnnnnnnnnnnnnnnnnnnnnnnnnnnnnnnnnnnnnnnnnnnnnnnnnnnnnnnnnnnnnnnnnnnnnnnnnnnnnnnnnnnnnnnnnnnnnnnnnnnnnnnnnnnnnnnnnnnnnnnnnnnnnnnnnnnnnnnnnnnnnnnnnnnnnnnnnnnnnnnnnnnnnnnnnnnnnnnnnnnnnnnnnnnnnnnnnnnnnnnnnnnnnnnnnnnnnnnnnnnnnnnnnnnnnnnnnnnnnnnnnnnnnnnnnnnnnnnnnnnnnnnnnnnnnnnnnnnnnnnnnnnnnnnnnnnnnnnnnnnnnnnnnnnnnnnnnnnnnnnnnnnnnnnnnnnnnnnnnnnnnnnnnnnnnnnnnnnnnnnnnnnnnnnnnnnnnnnnnnnnnnnnnnnnnnnnnnnnnnnnnnnnnnnnnnnnnnnnnnnnnnnnnnnnnnnnnnnnnnnnnnnnnnnnnnnnnnnnnnnnnnnnnnnnnnnnnnnnnnnnnnnnnnnnnnnnnnnnnnnnnnnnnnnnnnnnnnnnnnnnnnnnnnnnnnnnnnnnnnnnnnnnnnnnnnnnnnnnnnnnnnnnnnnnnnnnnnnnnnnnnnnnnnnnnnnnnnnnnnnnnnnnnnnnnnnnnnnnnnnnnnnnnnnnnnnnnnnnnnnnnnnnnnnnnnnnnnnnnnnnnnnnnnnnnnnnnnnnnnnnnnnnnnnnnnnnnnnnnnnnnnnnnnnnnnnnnnnnnnnnnnnnnnnnnnnnnnnnnnnnnnnnnnnnnnnnnnnnnnnnnnnnnnnnnnnnnnnnnnnnnnnnnnnnnnnnnnnnnnnnnnnnnnnnnnnnnnnnnnnnnnnnnnnnnnnnnnnnnnnnnnnnnnnnnnnnnnnnnnnnnnnnnnnnnnnnnnnnnnnnnnnnnnnnnnnnnnnnnnnnnnnnnnnnnnnnnnnnnnnnnnnnnnnnnnnnnnnnnnnnnnnnnnnnnnnnnnnnnnnnnnnnnnnnnnnnnnnnnnnnnnnnnnnnnnnnnnnnnnnnnnnnnnnnnnnnnnnnnnnnnnnnnnnnnnnnnnnnnnnnnnnnnnnnnnnnnnnnnnnnnnnnnnnnnnnnnnnnnnnnnnnnnnnnnnnnnnnnnnnnnnnnnnnnnnnnnnnnnnnnnnnnnnnnnnnnnnnnnnnnnnnnnnnnnnnnnnnnnnnnnnnnnnnnnnnnnnnnnnnnnnnnnnnnnnnnnnnnnnnnnnnnnnnnnnnnnnnnnnnnnnnnnnnnnnnnnnnnnnnnnnnnnnnnnnnnnnnnnnnnnnnnnnnnnnnnnnnnnnnnnnnnnnnnnnnnnnnnnnnnnnnnnnnnnnnnnnnnnnnnnnnnnnnnnnnnnnnnnnnnnnnnnnnnnnnnnnnnnnnnnnnnnnnnnnnnnnnnnnnnnnnnnnnnnnnnnnnnnnnnnnnnnnnnnnnnnnnnnnnnnnnnnnnnnnnnnnnnnnnnnnnnnnnnnnnnnnnnnnnnnnnnnnnnnnnnnnnnnnnnnnnnnnnnnnnnnnnnnnnnnnnnnnnnnnnnnnnnnnnnnnnnnnnnnnnnnnnnnnnnnnnnnnnnnnnnnnnnnnnnnnnnnnnnnnnnnnnnnnnnnnnnnnnnnnnnnnnnnnnnnnnnnnnnnnnnnnnnnnnnnnnnnnnnnnnnnnnnnnnnnnnnnnnnnnnnnnnnnnnnnnnnnnnnnnnnnnnnnnnnnnnnnnnnnnnnnnnnnnnnnnnnnnnnnnnnnnnnnnnnnnnnnnnnnnnnnnnnnnnnnnnnnnnnnnnnnnnnnnnnnnnnnnnnnnnnnnnnnnnnnnnnnnnnnnnnnnnnnnnnnnnnnnnnnnnnnnnnnnnnnnnnnnnnnnnnnnnnnnnnnnnnnnnnnnnnnnnnnnnnnnnnnnnnnnnnnnnnnnnnnnnnnnnnnnnnnnnnnnnnnnnnnnnnnnnnnnnnnnnnnnnnnnnnnnnnnnnnnnnnnnnnnnnnnnnnnnnnnnnnnnnnnnnnnnnnnnnnnnnnnnnnnnnnnnnnnnnnnnnnnnnnnnnnnnnnnnnnnnnnnnnnnnnnnnnnnnnnnnnnnnnnnnnnnnnnnnnnnnnnnnnnnnnnnnnnnnnnnnnnnnnnnnnnnnnnnnnnnnnnnnnnnnnnnnnnnnnnnnnnnnnnnnnnnnnnnnnnnnnnnnnnnnnnnnnnnnnnnnnnnnnnnnnnnnnnnnnnnnnnnnnnnnnnnnnnnnnnnnnnnnnnnnnnnnnnnnnnnnnnnnnnnnnnnnnnnnnnnnnnnnnnnnnnnnnnnnnnnnnnnnnnnnnnnnnnnnnnnnnnnnnnnnnnnnnnnnnnnnnnnnnnnnnnnnnnnnnnnnnnnnnnnnnnnnnnnnnnnnnnnnnnnnnnnnnnnnnnnnnnnnnnnnnnnnnnnnnnnnnnnnnnnnnnnnnnnnnnnnnnnnnnnnnnnnnnnnnnnnnnnnnnnnnnnnnnnnnnnnnnnnnnnnnnnnnnnnnnnnnnnnnnnnnnnnnnnnnnnnnnnnnnnnnnnnnnnnnnnnnnnnnnnnnnnnnnnnnnnnnnnnnnnnnnnnnnnnnnnnnnnnnnnnnnnnnnnnnnnnnnnnnnnnnnnnnnnnnnnnnnnnnnnnnnnnnnnnnnnnnnnnnnnnnnnnnnnnnnnnnnnnnnnnnnnnnnnnnnnnnnnnnnnnnnnnnnnnnnnnnnnnnnnnnnnnnnnnnnnnnnnnnnnnnnnnnnnnnnnnnnnnnnnnnnnnnnnnnnnnnnnnnnnnnnnnnnnnnnnnnnnnnnnnnnnnnnnnnnnnnnnnnnnnnnnnnnnnnnnnnnnnnnnnnnnnnnnnnnnnnnnnnnnnnnnnnnnnnnnnnnnnnnnnnnnnnnnnnnnnnnnnnnnnnnnnnnnnnnnnnnnnnnnnnnnnnnnnnnnnnnnnnnnnnnnnnnnnnnnnnnnnnnnnnnnnnnnnnnnnnnnnnnnnnnnnnnnnnnnnnnnnnnnnnnnnnnnnnnnnnnnnnnnnnnnnnnnnnnnnnnnnnnnnnnnnnnnnnnnnnnnnnnnnnnnnnnnnnnnnnnnnnnnnnnnnnnnnnnnnnnnnnnnnnnnnnnnnnnnnnnnnnnnnnnnnnnnnnnnnnnnnnnnnnnnnnnnnnnnnnnnnnnnnnnnnnnnnnnnnnnnnnnnnnnnnnnnnnnnnnnnnnnnnnnnnnnnnnnnnnnnnnnnnnnnnnnnnnnnnnnnnnnnnnnnnnnnnnnnnnnnnnnnnnnnnnnnnnnnnnnnnnnnnnnnnnnnnnnnnnnnnnnnnnnnnnnnnnnnnnnnnnnnnnnnnnnnnnnnnnnnnnnnnnnnnnnnnnnnnnnnnnnnnnnnnnnnnnnnnnnnnnnnnnnnnnnnnnnnnnnnnnnnnnnnnnnnnnnnnnnnnnnnnnnnnnnnnnnnnnnnnnnnnnnnnnnnnnnnnnnnnnnnnnnnnnnnnnnnnnnnnnnnnnnnnnnnnnnnnnnnnnnnnnnnnnnnnnnnnnnnnnnnnnnnnnnnnnnnnnnnnnnnnnnnnnnnnnnnnnnnnnnnnnnnnnnnnnnnnnnnnnnnnnnnnnnnnnnnnnnnnnnnnnnnnnnnnnnnnnnnnnnnnnnnnnnnnnnnnnnnnnnnnnnnnnnnnnnnnnnnnnnnnnnnnnnnnnnnnnnnnnnnnnnnnnnnnnnnnnnnnnnnnnnnnnnnnnnnnnnnnnnnnnnnnnnnnnnnnnnnnnnnnnnnnnnnnnnnnnnnnnnnnnnnnnnnnnnnnnnnnnnnnnnnnnnnnnnnnnnnnnnnnnnnnnnnnnnnnnnnnnnnnnnnnnnnnnnnnnnnnnnnnnnnnnnnnnnnnnnnnnnnnnnnnnnnnnnnnnnnnnnnnnnnnnnnnnnnnnnnnnnnnnnnnnnnnnnnnnnnnnnnnnnnnnnnnnnnnnnnnnnnnnnnnnnnnnnnnnnnnnnnnnnnnnnnnnnnnnnnnnnnnnnnnnnnnnnnnnnnnnnnnnnnnnnnnnnnnnnnnnnnnnnnnnnnnnnnnnnnnnnnnnnnnnnnnnnnnnnnnnnnnnnnnnnnnnnnnnnnnnnnnnnnnnnnnnnnnnnnnnnnnnnnnnnnnnnnnnnnnnnnnnnnnnnnnnnnnnnnnnnnnnnnnnnnnnnnnnnnnnnnnnnnnnnnnnnnnnnnnnnnnnnnnnnnnnnnnnnnnnnnnnnnnnnnnnnnnnnnnnnnnnnnnnnnnnnnnnnnnnnnnnnnnnnnnnnnnnnnnnnnnnnnnnnnnnnnnnnnnnnnnnnnnnnnnnnnnnnnnnnnnnnnnnnnnnnnnnnnnnnnnnnnnnnnnnnnnnnnnnnnnnnnnnnnnnnnnnnnnnnnnnnnnnnnnnnnnnnnnnnnnnnnnnnnnnnnnnnnnnnnnnnnnnnnnnnnnnnnnnnnnnnnnnnnnnnnnnnnnnnnnnnnnnnnnnnnnnnnnnnnnnnnnnnnnnnnnnnnnnnnnnnnnnnnnnnnnnnnnnnnnnnnnnnnnnnnnnnnnnnnnnnnnnnnnnnnnnnnnnnnnnnnnnnnnnnnnnnnnnnnnnnnnnnnnnnnnnnnnnnnnnnnnnnnnnnnnnnnnnnnnnnnnnnnnnnnnnnnnnnnnnnnnnnnnnnnnnnnnnnnnnnnnnnnnnnnnnnnnnnnnnnnnnnnnnnnnnnnnnnnnnnnnnnnnnnnnnnnnnnnnnnnnnnnnnnnnnnnnnnnnnnnnnnnnnnnnnnnnnnnnnnnnnnnnnnnnnnnnnnnnnnnnnnnnnnnnnnnnnnnnnnnnnnnnnnnnnnnnnnnnnnnnnnnnnnnnnnnnnnnnnnnnnnnnnnnnnnnnnnnnnnnnnnnnnnnnnnnnnnnnnnnnnnnnnnnnnnnnnnnnnnnnnnnnnnnnnnnnnnnnnnnnnnnnnnnnnnnnnnnnnnnnnnnnnnnnnnnnnnnnnnnnnnnnnnnnnnnnnnnnnnnnnnnnnnnnnnnnnnnnnnnnnnnnnnnnnnnnnnnnnnnnnnnnnnnnnnnnnnnnnnnnnnnnnnnnnnnnnnnnnnnnnnnnnnnnnnnnnnnnnnnnnnnnnnnnnnnnnnnnnnnnnnnnnnnnnnnnnnnnnnnnnnnnnnnnnnnnnnnnnnnnnnnnnnnnnnnnnnnnnnnnnnnnnnnnnnnnnnnnnnnnnnnnnnnnnnnnnnnnnnnnnnnnnnnnnnnnnnnnnnnnnnnnnnnnnnnnnnnnnnnnnnnnnnnnnnnnnnnnnnnnnnnnnnnnnnnnnnnnnnnnnnnnnnnnnnnnnnnnnnnnnnnnnnnnnnnnnnnnnnnnnnnnnnnnnnnnnnnnnnnnnnnnnnnnnnnnnnnnnnnnnnnnnnnnnnnnnnnnnnnnnnnnnnnnnnnnnnnnnnnnnnnnnnnnnnnnnnnnnnnnnnnnnnnnnnnnnnnnnnnnnnnnnnnnnnnnnnnnnnnnnnnnnnnnnnnnnnnnnnnnnnnnnnnnnnnnnnnnnnnnnnnnnnnnnnnnnnnnnnnnnnnnnnnnnnnnnnnnnnnnnnnnnnnnnnnnnnnnnnnnnnnnnnnnnnnnnnnnnnnnnnnnnnnnnnnnnnnnnnnnnnnnnnnnnnnnnnnnnnnnnnnnnnnnnnnnnnnnnnnnnnnnnnnnnnnnnnnnnnnnnnnnnnnnnnnnnnnnnnnnnnnnnnnnnnnnnnnnnnnnnnnnnnnnnnnnnnnnnnnnnnnnnnnnnnnnnnnnnnnnnnnnnnnnnnnnnnnnnnnnnnnnnnnnnnnnnnnnnnnnnnnnnnnnnnnnnnnnnnnnnnnnnnnnnnnnnnnnnnnnnnnnnnnnnnnnnnnnnnnnnnnnnnnnnnnnnnnnnnnnnnnnnnnnnnnnnnnnnnnnnnnnnnnnnnnnnnnnnnnnnnnnnnnnnnnnnnnnnnnnnnnnnnnnnnnnnnnnnnnnnnnnnnnnnnnnnnnnnnnnnnnnnnnnnnnnnnnnnnnnnnnnnnnnnnnnnnnnnnnnnnnnnnnnnnnnnnnnnnnnnnnnnnnnnnnnnnnnnnnnnnnnnnnnnnnnnnnnnnnnnnnnnnnnnnnnnnnnnnnnnnnnnnnnnnnnnnnnnnnnnnnnnnnnnnnnnnnnnnnnnnnnnnnnnnnnnnnnnnnnnnnnnnnnnnnnnnnnnnnnnnnnnnnnnnnnnnnnnnnnnnnnnnnnnnnnnnnnnnnnnnnnnnnnnnnnnnnnnnnnnnnnnnnnnnnnnnnnnnnnnnnnnnnnnnnnnnnnnnnnnnnnnnnnnnnnnnnnnnnnnnnnnnnnnnnnnnnnnnnnnnnnnnnnnnnnnnnnnnnnnnnnnnnnnnnnnnnnnnnnnnnnnnnnnnnnnnnnnnnnnnnnnnnnnnnnnnnnnnnnnnnnnnnnnnnnnnnnnnnnnnnnnnnnnnnnnnnnnnnnnnnnnnnnnnnnnnnnnnnnnnnnnnnnnnnnnnnnnnnnnnnnnnnnnnnnnnnnnnnnnnnnnnnnnnnnnnnnnnnnnnnnnnnnnnnnnnnnnnnnnnnnnnnnnnnnnnnnnnnnnnnnnnnnnnnnnnnnnnnnnnnnnnnnnnnnnnnnnnnnnnnnnnnnnnnnnnnnnnnnnnnnnnnnnnnnnnnnnnnnnnnnnnnnnnnnnnnnnnnnnnnnnnnnnnnnnnnnnnnnnnnnnnnnnnnnnnnnnnnnnnnnnnnnnnnnnnnnnnnnnnnnnnnnnnnnnnnnnnnnnnnnnnnnnnnnnnnnnnnnnnnnnnnnnnnnnnnnnnnnnnnnnnnnnnnnnnnnnnnnnnnnnnnnnnnnnnnnnnnnnnnnnnnnnnnnnnnnnnnnnnnnnnnnnnnnnnnnnnnnnnnnnnnnnnnnnnnnnnnnnnnnnnnnnnnnnnnnnnnnnnnnnnnnnnnnnnnnnnnnnnnnnnnnnnnnnnnnnnnnnnnnnnnnnnnnnnnnnnnnnnnnnnnnnnnnnnnnnnnnnnnnnnnnnnnnnnnnnnnnnnnnnnnnnnnnnnnnnnnnnnnnnnnnnnnnnnnnnnnnnnnnnnnnnnnnnnnnnnnnnnnnnnnnnnnnnnnnnnnnnnnnnnnnnnnnnnnnnnnnnnnnnnnnnnnnnnnnnnnnnnnnnnnnnnnnnnnnnnnnnnnnnnnnnnnnnnnnnnnnnnnnnnnnnnnnnnnnnnnnnnnnnnnnnnnnnnnnnnnnnnnnnnnnnnnnnnnnnnnnnnnnnnnnnnnnnnnnnnnnnnnnnnnnnnnnnnnnnnnnnnnnnnnnnnnnnnnnnnnnnnnnnnnnnnnnnnnnnnnnnnnnnnnnnnnnnnnnnnnnnnnnnnnnnnnnnnnnnnnnnnnnnnnnnnnnnnnnnnnnnnnnnnnnnnnnnnnnnnnnnnnnnnnnnnnnnnnnnnnnnnnnnnnnnnnnnnnnnnnnnnnnnnnnnnnnnnnnnnnnnnnnnnnnnnnnnnnnnnnnnnnnnnnnnnnnnnnnnnnnnnnnnnnnnnnnnnnnnnnnnnnnnnnnnnnnnnnnnnnnnnnnnnnnnnnnnnnnnnnnnnnnnnnnnnnnnnnnnnnnnnnnnnnnnnnnnnnnnnnnnnnnnnnnnnnnnnnnnnnnnnnnnnnnnnnnnnnnnnnnnnnnnnnnnnnnnnnnnnnnnnnnnnnnnnnnnnnnnnnnnnnnnnnnnnnnnnnnnnnnnnnnnnnnnnnnnnnnnnnnnnnnnnnnnnnnnnnnnnnnnnnnnnnnnnnnnnnnnnnnnnnnnnnnnnnnnnnnnnnnnnnnnnnnnnnnnnnnnnnnnnnnnnnnnnnnnnnnnnnnnnnnnnnnnnnnnnnnnnnnnnnnnnnnnnnnnnnnnnnnnnnnnnnnnnnnnnnnnnnnnnnnnnnnnnnnnnnnnnnnnnnnnnnnnnnnnnnnnnnnnnnnnnnnnnnnnnnnnnnnnnnnnnnnnnnnnnnnnnnnnnnnnnnnnnnnnnnnnnnnnnnnnnnnnnnnnnnnnnnnnnnnnnnnnnnnnnnnnnnnnnnnnnnnnnnnnnnnnnnnnnnnnnnnnnnnnnnnnnnnnnnnnnnnnnnnnnnnnnnnnnnnnnnnnnnnnnnnnnnnnnnnnnnnnnnnnnnnnnnnnnnnnnnnnnnnnnnnnnnnnnnnnnnnnnnnnnnnnnnnnnnnnnnnnnnnnnnnnnnnnnnnnnnnnnnnnnnnnnnnnnnnnnnnnnnnnnnnnnnnnnnnnnnnnnnnnnnnnnnnnnnnnnnnnnnnnnnnnnnnnnnnnnnnnnnnnnnnnnnnnnnnnnnnnnnnnnnnnnnnnnnnnnnnnnnnnnnnnnnnnnnnnnnnnnnnnnnnnnnnnnnnnnnnnnnnnnnnnnnnnnnnnnnnnnnnnnnnnnnnnnnnnnnnnnnnnnnnnnnnnnnnnnnnnnnnnnnnnnnnnnnnnnnnnnnnnnnnnnnnnnnnnnnnnnnnnnnnnnnnnnnnnnnnnnnnnnnnnnnnnnnnnnnnnnnnnnnnnnnnnnnnnnnnnnnnnnnnnnnnnnnnnnnnnnnnnnnnnnnnnnnnnnnnnnnnnnnnnnnnnnnnnnnnnnnnnnnnnnnnnnnnnnnnnnnnnnnnnnnnnnnnnnnnnnnnnnnnnnnnnnnnnnnnnnnnnnnnnnnnnnnnnnnnnnnnnnnnnnnnnnnnnnnnnnnnnnnnnnnnnnnnnnnnnnnnnnnnnnnnnnnnnnnnnnnnnnnnnnnnnnnnnnnnnnnnnnnnnnnnnnnnnnnnnnnnnnnnnnnnnnnnnnnnnnnnnnnnnnnnnnnnnnnnnnnnnnnnnnnnnnnnnnnnnnnnnnnnnnnnnnnnnnnnnnnnnnnnnnnnnnnnnnnnnnnnnnnnnnnnnnnnnnnnnnnnnnnnnnnnnnnnnnnnnnnnnnnnnnnnnnnnnnnnnnnnnnnnnnnnnnnnnnnnnnnnnnnnnnnnnnnnnnnnnnnnnnnnnnnnnnnnnnnnnnnnnnnnnnnnnnnnnnnnnnnnnnnnnnnnnnnnnnnnnnnnnnnnnnnnnnnnnnnnnnnnnnnnnnnnnnnnnnnnnnnnnnnnnnnnnnnnnnnnnnnnnnnnnnnnnnnnnnnnnnnnnnnnnnnnnnnnnnnnnnnnnnnnnnnnnnnnnnnnnnnnnnnnnnnnnnnnnnnnnnnnnnnnnnnnnnnnnnnnnnnnnnnnnnnnnnnnnnnnnnnnnnnnnnnnnnnnnnnnnnnnnnnnnnnnnnnnnnnnnnnnnnnnnnnnnnnnnnnnnnnnnnnnnnnnnnnnnnnnnnnnnnnnnnnnnnnnnnnnnnnnnnnnnnnnnnnnnnnnnnnnnnnnnnnnnnnnnnnnnnnnnnnnnnnnnnnnnnnnnnnnnnnnnnnnnnnnnnnnnnnnnnnnnnnnnnnnnnnnnnnnnnnnnnnnnnnnnnnnnnnnnnnnnnnnnnnnnnnnnnnnnnnnnnnnnnnnnnnnnnnnnnnnnnnnnnnnnnnnnnnnnnnnnnnnnnnnnnnnnnnnnnnnnnnnnnnnnnnnnnnnnnnnnnnnnnnnnnnnnnnnnnnnnnnnnnnnnnnnnnnnnnnnnnnnnnnnnnnnnnnnnnnnnnnnnnnnnnnnnnnnnnnnnnnnnnnnnnnnnnnnnnnnnnnnnnnnnnnnnnnnnnnnnnnnnnnnnnnnnnnnnnnnnnnnnnnnnnnnnnnnnnnnnnnnnnnnnnnnnnnnnnnnnnnnnnnnnnnnnnnnnnnnnnnnnnnnnnnnnnnnnnnnnnnnnnnnnnnnnnnnnnnnnnnnnnnnnnnnnnnnnnnnnnnnnnnnnnnnnnnnnnnnnnnnnnnnnnnnnnnnnnnnnnnnnnnnnnnnnnnnnnnnnnnnnnnnnnnnnnnnnnnnnnnnnnnnnnnnnnnnnnnnnnnnnnnnnnnnnnnnnnnnnnnnnnnnnnnnnnnnnnnnnnnnnnnnnnnnnnnnnnnnnnnnnnnnnnnnnnnnnnnnnnnnnnnnnnnnnnnnnnnnnnnnnnnnnnnnnnnnnnnnnnnnnnnnnnnnnnnnnnnnnnnnnnnnnnnnnnnnnnnnnnnnnnnnnnnnnnnnnnnnnnnnnnnnnnnnnnnnnnnnnnnnnnnnnnnnnnnnnnnnnnnnnnnnnnnnnnnnnnnnnnnnnnnnnnnnnnnnnnnnnnnnnnnnnnnnnnnnnnnnnnnnnnnnnnnnnnnnnnnnnnnnnnnnnnnnnnnnnnnnnnnnnnnnnnnnnnnnnnnnnnnnnnnnnnnnnnnnnnnnnnnnnnnnnnnnnnnnnnnnnnnnnnnnnnnnnnnnnnnnnnnnnnnnnnnnnnnnnnnnnnnnnnnnnnnnnnnnnnnnnnnnnnnnnnnnnnnnnnnnnnnnnnnnnnnnnnnnnnnnnnnnnnnnnnnnnnnnnnnnnnnnnnnnnnnnnnnnnnnnnnnnnnnnnnnnnnnnnnnnnnnnnnnnnnnnnnnnnnnnnnnnnnnnnnnnnnnnnnnnnnnnnnnnnnnnnnnnnnnnnnnnnnnnnnnnnnnnnnnnnnnnnnnnnnnnnnnnnnnnnnnnnnnnnnnnnnnnnnnnnnnnnnnnnnnnnnnnnnnnnnnnnnnnnnnnnnnnnnnnnnnnnnnnnnnnnnnnnnnnnnnnnnnnnnnnnnnnnnnnnnnnnnnnnnnnnnnnnnnnnnnnnnnnnnnnnnnnnnnnnnnnnnnnnnnnnnnnnnnnnnnnnnnnnnnnnnnnnnnnnnnnnnnnnnnnnnnnnnnnnnnnnnnnnnnnnnnnnnnnnnnnnnnnnnnnnnnnnnnnnnnnnnnnnnnnnnnnnnnnnnnnnnnnnnnnnnnnnnnnnnnnnnnnnnnnnnnnnnnnnnnnnnnnnnnnnnnnnnnnnnnnnnnnnnnnnnnnnnnnnnnnnnnnnnnnnnnnnnnnnnnnnnnnnnnnnnnnnnnnnnnnnnnnnnnnnnnnnnnnnnnnnnnnnnnnnnnnnnnnnnnnnnnnnnnnnnnnnnnnnnnnnnnnnnnnnnnnnnnnnnnnnnnnnnnnnnnnnnnnnnnnnnnnnnnnnnnnnnnnnnnnnnnnnnnnnnnnnnnnnnnnnnnnnnnnnnnnnnnnnnnnnnnnnnnnnnnnnnnnnnnnnnnnnnnnnnnnnnnnnnnnnnnnnnnnnnnnnnnnnnnnnnnnnnnnnnnnnnnnnnnnnnnnnnnnnnnnnnnnnnnnnnnnnnnnnnnnnnnnnnnnnnnnnnnnnnnnnnnnnnnnnnnnnnnnnnnnnnnnnnnnnnnnnnnnnnnnnnnnnnnnnnnnnnnnnnnnnnnnnnnnnnnnnnnnnnnnnnnnnnnnnnnnnnnnnnnnnnnnnnnnnnnnnnnnnnnnnnnnnnnnnnnnnnnnnnnnnnnnnnnnnnnnnnnnnnnnnnnnnnnnnnnnnnnnnnnnnnnnnnnnnnnnnnnnnnnnnnnnnnnnnnnnnnnnnnnnnnnnnnnnnnnnnnnnnnnnnnnnnnnnnnnnnnnnnnnnnnnnnnnnnnnnnnnnnnnnnnnnnnnnnnnnnnnnnnnnnnnnnnnnnnnnnnnnnnnnnnnnnnnnnnnnnnnnnnnnnnnnnnnnnnnnnnnnnnnnnnnnnnnnnnnnnnnnnnnnnnnnnnnnnnnnnnnnnnnnnnnnnnnnnnnnnnnnnnnnnnnnnnnnnnnnnnnnnnnnnnnnnnnnnnnnnnnnnnnnnnnnnnnnnnnnnnnnnnnnnnnnnnnnnnnnnnnnnnnnnnnnnnnnnnnnnnnnnnnnnnnnnnnnnnnnnnnnnnnnnnnnnnnnnnnnnnnnnnnnnnnnnnnnnnnnnnnnnnnnnnnnnnnnnnnnnnnnnnnnnnnnnnnnnnnnnnnnnnnnnnnnnnnnnnnnnnnnnnnnnnnnnnnnnnnnnnnnnnnnnnnnnnnnnnnnnnnnnnnnnnnnnnnnnnnnnnnnnnnnnnnnnnnnnnnnnnnnnnnnnnnnnnnnnnnnnnnnnnnnnnnnnnnnnnnnnnnnnnnnnnnnnnnnnnnnnnnnnnnnnnnnnnnnnnnnnnnnnnnnnnnnnnnnnnnnnnnnnnnnnnnnnnnnnnnnnnnnnnnnnnnnnnnnnnnnnnnnnnnnnnnnnnnnnnnnnnnnnnnnnnnnnnnnnnnnnnnnnnnnnnnnnnnnnnnnnnnnnnnnnnnnnnnnnnnnnnnnnnnnnnnnnnnnnnnnnnnnnnnnnnnnnnnnnnnnnnnnnnnnnnnnnnnnnnnnnnnnnnnnnnnnnnnnnnnnnnnnnnnnnnnnnnnnnnnnnnnnnnnnnnnnnnnnnnnnnnnnnnnnnnnnnnnnnnnnnnnnnnnnnnnnnnnnnnnnnnnnnnnnnnnnnnnnnnnnnnnnnnnnnnnnnnnnnnnnnnnnnnnnnnnnnnnnnnnnnnnnnnnnnnnnnnnnnnnnnnnnnnnnnnnnnnnnnnnnnnnnnnnnnnnnnnnnnnnnnnnnnnnnnnnnnnnnnnnnnnnnnnnnnnnnnnnnnnnnnnnnnnnnnnnnnnnnnnnnnnnnnnnnnnnnnnnnnnnnnnnnnnnnnnnnnnnnnnnnnnnnnnnnnnnnnnnnnnnnnnnnnnnnnnnnnnnnnnnnnnnnnnnnnnnnnnnnnnnnnnnnnnnnnnnnnnnnnnnnnnnnnnnnnnnnnnnnnnnnnnnnnnnnnnnnnnnnnnnnnnnnnnnnnnnnnnnnnnnnnnnnnnnnnnnnnnnnnnnnnnnnnnnnnnnnnnnnnnnnnnnnnnnnnnnnnnnnnnnnnnnnnnnnnnnnnnnnnnnnnnnnnnnnnnnnnnnnnnnnnnnnnnnnnnnnnnnnnnnnnnnnnnnnnnnnnnnnnnnnnnnnnnnnnnnnnnnnnnnnnnnnnnnnnnnnnnnnnnnnnnnnnnnnnnnnnnnnnnnnnnnnnnnnnnnnnnnnnnnnnnnnnnnnnnnnnnnnnnnnnnnnnnnnnnnnnnnnnnnnnnnnnnnnnnnnnnnnnnnnnnnnnnnnnnnnnnnnnnnnnnnnnnnnnnnnnnnnnnnnnnnnnnnnnnnnnnnnnnnnnnnnnnnnnnnnnnnnnnnnnnnnnnnnnnnnnnnnnnnnnnnnnnnnnnnnnnnnnnnnnnnnnnnnnnnnnnnnnnnnnnnnnnnnnnnnnnnnnnnnnnnnnnnnnnnnnnnnnnnnnnnnnnnnnnnnnnnnnnnnnnnnnnnnnnnnnnnnnnnnnnnnnnnnnnnnnnnnnnnnnnnnnnnnnnnnnnnnnnnnnnnnnnnnnnnnnnnnnnnnnnnnnnnnnnnnnnnnnnnnnnnnnnnnnnnnnnnnnnnnnnnnnnnnnnnnnnnnnnnnnnnnnnnnnnnnnnnnnnnnnnnnnnnnnnnnnnnnnnnnnnnnnnnnnnnnnnnnnnnnnnnnnnnnnnnnnnnnnnnnnnnnnnnnnnnnnnnnnnnnnnnnnnnnnnnnnnnnnnnnnnnnnnnnnnnnnnnnnnnnnnnnnnnnnnnnnnnnnnnnnnnnnnnnnnnnnnnnnnnnnnnnnnnnnnnnnnnnnnnnnnnnnnnnnnnnnnnnnnnnnnnnnnnnnnnnnnnnnnnnnnnnnnnnnnnnnnnnnnnnnnnnnnnnnnnnnnnnnnnnnnnnnnnnnnnnnnnnnnnnnnnnnnnnnnnnnnnnnnnnnnnnnnnnnnnnnnnnnnnnnnnnnnnnnnnnnnnnnnnnnnnnnnnnnnnnnnnnnnnnnnnnnnnnnnnnnnnnnnnnnnnnnnnnnnnnnnnnnnnnnnnnnnnnnnnnnnnnnnnnnnnnnnnnnnnnnnnnnnnnnnnnnnnnnnnnnnnnnnnnnnnnnnnnnnnnnnnnnnnnnnnnnnnnnnnnnnnnnnnnnnnnnnnnnnnnnnnnnnnnnnnnnnnnnnnnnnnnnnnnnnnnnnnnnnnnnnnnnnnnnnnnnnnnnnnnnnnnnnnnnnnnnnnnnnnnnnnnnnnnnnnnnnnnnnnnnnnnnnnnnnnnnnnnnnnnnnnnnnnnnnnnnnnnnnnnnnnnnnnnnnnnnnnnnnnnnnnnnnnnnnnnnnnnnnnnnnnnnnnnnnnnnnnnnnnnnnnnnnnnnnnnnnnnnnnnnnnnnnnnnnnnnnnnnnnnnnnnnnnnnnnnnnnnnnnnnnnnnnnnnnnnnnnnnnnnnnnnnnnnnnnnnnnnnnnnnnnnnnnnnnnnnnnnnnnnnnnnnnnnnnnnnnnnnnnnnnnnnnnnnnnnnnnnnnnnnnnnnnnnnnnnnnnnnnnnnnnnnnnnnnnnnnnnnnnnnnnnnnnnnnnnnnnnnnnnnnnnnnnnnnnnnnnnnnnnnnnnnnnnnnnnnnnnnnnnnnnnnnnnnnnnnnnnnnnnnnnnnnnnnnnnnnnnnnnnnnnnnnnnnnnnnnnnnnnnnnnnnnnnnnnnnnnnnnnnnnnnnnnnnnnnnnnnnnnnnnnnnnnnnnnnnnnnnnnnnnnnnnnnnnnnnnnnnnnnnnnnnnnnnnnnnnnnnnnnnnnnnnnnnnnnnnnnnnnnnnnnnnnnnnnnnnnnnnnnnnnnnnnnnnnnnnnnnnnnnnnnnnnnnnnnnnnnnnnnnnnnnnnnnnnnnnnnnnnnnnnnnnnnnnnnnnnnnnnnnnnnnnnnnnnnnnnnnnnnnnnnnnnnnnnnnnnnnnnnnnnnnnnnnnnnnnnnnnnnnnnnnnnnnnnnnnnnnnnnnnnnnnnnnnnnnnnnnnnnnnnnnnnnnnnnnnnnnnnnnnnnnnnnnnnnnnnnnnnnnnnnnnnnnnnnnnnnnnnnnnnnnnnnnnnnnnnnnnnnnnnnnnnnnnnnnnnnnnnnnnnnnnnnnnnnnnnnnnnnnnnnnnnnnnnnnnnnnnnnnnnnnnnnnnnnnnnnnnnnnnnnnnnnnnnnnnnnnnnnnnnnnnnnnnnnnnnnnnnnnnnnnnnnnnnnnnnnnnnnnnnnnnnnnnnnnnnnnnnnnnnnnnnnnnnnnnnnnnnnnnnnnnnnnnnnnnnnnnnnnnnnnnnnnnnnnnnnnnnnnnnnnnnnnnnnnnnnnnnnnnnnnnnnnnnnnnnnnnnnnnnnnnnnnnnnnnnnnnnnnnnnnnnnnnnnnnnnnnnnnnnnnnnnnnnnnnnnnnnnnnnnnnnnnnnnnnnnnnnnnnnnnnnnnnnnnnnnnnnnnnnnnnnnnnnnnnnnnnnnnnnnnnnnnnnnnnnnnnnnnnnnnnnnnnnnnnnnnnnnnnnnnnnnnnnnnnnnnnnnnnnnnnnnnnnnnnnnnnnnnnnnnnnnnnnnnnnnnnnnnnnnnnnnnnnnnnnnnnnnnnnnnnnnnnnnnnnnnnnnnnnnnnnnnnnnnnnnnnnnnnnnnnnnnnnnnnnnnnnnnnnnnnnnnnnnnnnnnnnnnnnnnnnnnnnnnnnnnnnnnnnnnnnnnnnnnnnnnnnnnnnnnnnnnnnnnnnnnnnnnnnnnnnnnnnnnnnnnnnnnnnnnnnnnnnnnnnnnnnnnnnnnnnnnnnnnnnnnnnnnnnnnnnnnnnnnnnnnnnnnnnnnnnnnnnnnnnnnnnnnnnnnnnnnnnnnnnnnnnnnnnnnnnnnnnnnnnnnnnnnnnnnnnnnnnnnnnnnnnnnnnnnnnnnnnnnnnnnnnnnnnnnnnnnnnnnnnnnnnnnnnnnnnnnnnnnnnnnnnnnnnnnnnnnnnnnnnnnnnnnnnnnnnnnnnnnnnnnnnnnnnnnnnnnnnnnnnnnnnnnnnnnnnnnnnnnnnnnnnnnnnnnnnnnnnnnnnnnnnnnnnnnnnnnnnnnnnnnnnnnnnnnnnnnnnnnnnnnnnnnnnnnnnnnnnnnnnnnnnnnnnnnnnnnnnnnnnnnnnnnnnnnnnnnnnnnnnnnnnnnnnnnnnnnnnnnnnnnnnnnnnnnnnnnnnnnnnnnnnnnnnnnnnnnnnnnnnnnnnnnnnnnnnnnnnnnnnnnnnnnnnnnnnnnnnnnnnnnnnnnnnnnnnnnnnnnnnnnnnnnnnnnnnnnnnnnnnnnnnnnnnnnnnnnnnnnnnnnnnnnnnnnnnnnnnnnnnnnnnnnnnnnnnnnnnnnnnnnnnnnnnnnnnnnnnnnnnnnnnnnnnnnnnnnnnnnnnnnnnnnnnnnnnnnnnnnnnnnnnnnnnnnnnnnnnnnnnnnnnnnnnnnnnnnnnnnnnnnnnnnnnnnnnnnnnnnnnnnnnnnnnnnnnnnnnnnnnnnnnnnnnnnnnnnnnnnnnnnnnnnnnnnnnnnnnnnnnnnnnnnnnnnnnnnnnnnnnnnnnnnnnnnnnnnnnnnnnnnnnnnnnnnnnnnnnnnnnnnnnnnnnnnnnnnnnnnnnnnnnnnnnnnnnnnnnnnnnnnnnnnnnnnnnnnnnnnnnnnnnnnnnnnnnnnnnnnnnnnnnnnnnnnnnnnnnnnnnnnnnnnnnnnnnnnnnnnnnnnnnnnnnnnnnnnnnnnnnnnnnnnnnnnnnnnnnnnnnnnnnnnnnnnnnnnnnnnnnnnnnnnnnnnnnnnnnnnnnnnnnnnnnnnnnnnnnnnnnnnnnnnnnnnnnnnnnnnnnnnnnnnnnnnnnnnnnnnnnnnnnnnnnnnnnnnnnnnnnnnnnnnnnnnnnnnnnnnnnnnnnnnnnnnnnnnnnnnnnnnnnnnnnnnnnnnnnnnnnnnnnnnnnnnnnnnnnnnnnnnnnnnnnnnnnnnnnnnnnnnnnnnnnnnnnnnnnnnnnnnnnnnnnnnnnnnnnnnnnnnnnnnnnnnnnnnnnnnnnnnnnnnnnnnnnnnnnnnnnnnnnnnnnnnnnnnnnnnnnnnnnnnnnnnnnnnnnnnnnnnnnnnnnnnnnnnnnnnnnnnnnnnnnnnnnnnnnnnnnnnnnnnnnnnnnnnnnnnnnnnnnnnnnnnnnnnnnnnnnnnnnnnnnnnnnnnnnnnnnnnnnnnnnnnnnnnnnnnnnnnnnnnnnnnnnnnnnnnnnnnnnnnnnnnnnnnnnnnnnnnnnnnnnnnnnnnnnnnnnnnnnnnnnnnnnnnnnnnnnnnnnnnnnnnnnnnnnnnnnnnnnnnnnnnnnnnnnnnnnnnnnnnnnnnnnnnnnnnnnnnnnnnnnnnnnnnnnnnnnnnnnnnnnnnnnnnnnnnnnnnnnnnnnnnnnnnnnnnnnnnnnnnnnnnnnnnnnnnnnnnnnnnnnnnnnnnnnnnnnnnnnnnnnnnnnnnnnnnnnnnnnnnnnnnnnnnnnnnnnnnnnnnnnnnnnnnnnnnnnnnnnnnnnnnnnnnnnnnnnnnnnnnnnnnnnnnnnnnnnnnnnnnnnnnnnnnnnnnnnnnnnnnnnnnnnnnnnnnnnnnnnnnnnnnnnnnnnnnnnnnnnnnnnnnnnnnnnnnnnnnnnnnnnnnnnnnnnnnnnnnnnnnnnnnnnnnnnnnnnnnnnnnnnnnnnnnnnnnnnnnnnnnnnnnnnnnnnnnnnnnnnnnnnnnnnnnnnnnnnnnnnnnnnnnnnnnnnnnnnnnnnnnnnnnnnnnnnnnnnnnnnnnnnnnnnnnnnnnnnnnnnnnnnnnnnnnnnnnnnnnnnnnnnnnnnnnnnnnnnnnnnnnnnnnnnnnnnnnnnnnnnnnnnnnnnnnnnnnnnnnnnnnnnnnnnnnnnnnnnnnnnnnnnnnnnnnnnnnnnnnnnnnnnnnnnnnnnnnnnnnnnnnnnnnnnnnnnnnnnnnnnnnnnnnnnnnnnnnnnnnnnnnnnnnnnnnnnnnnnnnnnnnnnnnnnnnnnnnnnnnnnnnnnnnnnnnnnnnnnnnnnnnnnnnnnnnnnnnnnnnnnnnnnnnnnnnnnnnnnnnnnnnnnnnnnnnnnnnnnnnnnnnnnnnnnnnnnnnnnnnnnnnnnnnnnnnnnnnnnnnnnnnnnnnnnnnnnnnnnnnnnnnnnnnnnnnnnnnnnnnnnnnnnnnnnnnnnnnnnnnnnnnnnnnnnnnnnnnnnnnnnnnnnnnnnnnnnnnnnnnnnnnnnnnnnnnnnnnnnnnnnnnnnnnnnnnnnnnnnnnnnnnnnnnnnnnnnnnnnnnnnnnnnnnnnnnnnnnnnnnnnnnnnnnnnnnnnnnnnnnnnnnnnnnnnnnnnnnnnnnnnnnnnnnnnnnnnnnnnnnnnnnnnnnnnnnnnnnnnnnnnnnnnnnnnnnnnnnnnnnnnnnnnnnnnnnnnnnnnnnnnnnnnnnnnnnnnnnnnnnnnnnnnnnnnnnnnnnnnnnnnnnnnnnnnnnnnnnnnnnnnnnnnnnnnnnnnnnnnnnnnnnnnnnnnnnnnnnnnnnnnnnnnnnnnnnnnnnnnnnnnnnnnnnnnnnnnnnnnnnnnnnnnnnnnnnnnnnnnnnnnnnnnnnnnnnnnnnnnnnnnnnnnnnnnnnnnnnnnnnnnnnnnnnnnnnnnnnnnnnnnnnnnnnnnnnnnnnnnnnnnnnnnnnnnnnnnnnnnnnnnnnnnnnnnnnnnnnnnnnnnnnnnnnnnnnnnnnnnnnnnnnnnnnnnnnnnnnnnnnnnnnnnnnnnnnnnnnnnnnnnnnnnnnnnnnnnnnnnnnnnnnnnnnnnnnnnnnnnnnnnnnnnnnnnnnnnnnnnnnnnnnnnnnnnnnnnnnnnnnnnnnnnnnnnnnnnnnnnnnnnnnnnnnnnnnnnnnnnnnnnnnnnnnnnnnnnnnnnnnnnnnnnnnnnnnnnnnnnnnnnnnnnnnnnnnnnnnnnnnnnnnnnnnnnnnnnnnnnnnnnnnnnnnnnnnnnnnnnnnnnnnnnnnnnnnnnnnnnnnnnnnnnnnnnnnnnnnnnnnnnnnnnnnnnnnnnnnnnnnnnnnnnnnnnnnnnnnnnnnnnnnnnnnnnnnnnnnnnnnnnnnnnnnnnnnnnnnnnnnnnnnnnnnnnnnnnnnnnnnnnnnnnnnnnnnnnnnnnnnnnnnnnnnnnnnnnnnnnnnnnnnnnnnnnnnnnnnnnnnnnnnnnnnnnnnnnnnnnnnnnnnnnnnnnnnnnnnnnnnnnnnnnnnnnnnnnnnnnnnnnnnnnnnnnnnnnnnnnnnnnnnnnnnnnnnnnnnnnnnnnnnnnnnnnnnnnnnnnnnnnnnnnnnnnnnnnnnnnnnnnnnnnnnnnnnnnnnnnnnnnnnnnnnnnnnnnnnnnnnnnnnnnnnnnnnnnnnnnnnnnnnnnnnnnnnnnnnnnnnnnnnnnnnnnnnnnnnnnnnnnnnnnnnnnnnnnnnnnnnnnnnnnnnnnnnnnnnnnnnnnnnnnnnnnnnnnnnnnnnnnnnnnnnnnnnnnnnnnnnnnnnnnnnnnnnnnnnnnnnnnnnnnnnnnnnnnnnnnnnnnnnnnnnnnnnnnnnnnnnnnnnnnnnnnnnnnnnnnnnnnnnnnnnnnnnnnnnnnnnnnnnnnnnnnnnnnnnnnnnnnnnnnnnnnnnnnnnnnnnnnnnnnnnnnnnnnnnnnnnnnnnnnnnnnnnnnnnnnnnnnnnnnnnnnnnnnnnnnnnnnnnnnnnnnnnnnnnnnnnnnnnnnnnnnnnnnnnnnnnnnnnnnnnnnnnnnnnnnnnnnnnnnnnnnnnnnnnnnnnnnnnnnnnnnnnnnnnnnnnnnnnnnnnnnnnnnnnnnnnnnnnnnnnnnnnnnnnnnnnnnnnnnnnnnnnnnnnnnnnnnnnnnnnnnnnnnnnnnnnnnnnnnnnnnnnnnnnnnnnnnnnnnnnnnnnnnnnnnnnnnnnnnnnnnnnnnnnnnnnnnnnnnnnnnnnnnnnnnnnnnnnnnnnnnnnnnnnnnnnnnnnnnnnnnnnnnnnnnnnnnnnnnnnnnnnnnnnnnnnnnnnnnnnnnnnnnnnnnnnnnnnnnnnnnnnnnnnnnnnnnnnnnnnnnnnnnnnnnnnnnnnnnnnnnnnnnnnnnnnnnnnnnnnnnnnnnnnnnnnnnnnnnnnnnnnnnnnnnnnnnnnnnnnnnnnnnnnnnnnnnnnnnnnnnnnnnnnnnnnnnnnnnnnnnnnnnnnnnnnnnnnnnnnnnnnnnnnnnnnnnnnnnnnnnnnnnnnnnnnnnnnnnnnnnnnnnnnnnnnnnnnnnnnnnnnnnnnnnnnnnnnnnnnnnnnnnnnnnnnnnnnnnnnnnnnnnnnnnnnnnnnnnnnnnnnnnnnnnnnnnnnnnnnnnnnnnnnnnnnnnnnnnnnnnnnnnnnnnnnnnnnnnnnnnnnnnnnnnnnnnnnnnnnnnnnnnnnnnnnnnnnnnnnnnnnnnnnnnnnnnnnnnnnnnnnnnnnnnnnnnnnnnnnnnnnnnnnnnnnnnnnnnnnnnnnnnnnnnnnnnnnnnnnnnnnnnnnnnnnnnnnnnnnnnnnnnnnnnnnnnnnnnnnnnnnnnnnnnnnnnnnnnnnnnnnnnnnnnnnnnnnnnnnnnnnnnnnnnnnnnnnnnnnnnnnnnnnnnnnnnnnnnnnnnnnnnnnnnnnnnnnnnnnnnnnnnnnnnnnnnnnnnnnnnnnnnnnnnnnnnnnnnnnnnnnnnnnnnnnnnnnnnnnnnnnnnnnnnnnnnnnnnnnnnnnnnnnnnnnnnnnnnnnnnnnnnnnnnnnnnnnnnnnnnnnnnnnnnnnnnnnnnnnnnnnnnnnnnnnnnnnnnnnnnnnnnnnnnnnnnnnnnnnnnnnnnnnnnnnnnnnnnnnnnnnnnnnnnnnnnnnnnnnnnnnnnnnnnnnnnnnnnnnnnnnnnnnnnnnnnnnnnnnnnnnnnnnnnnnnnnnnnnnnnnnnnnnnnnnnnnnnnnnnnnnnnnnnnnnnnnnnnnnnnnnnnnnnnnnnnnnnnnnnnnnnnnnnnnnnnnnnnnnnnnnnnnnnnnnnnnnnnnnnnnnnnnnnnnnnnnnnnnnnnnnnnnnnnnnnnnnnnnnnnnnnnnnnnnnnnnnnnnnnnnnnnnnnnnnnnnnnnnnnnnnnnnnnnnnnnnnnnnnnnnnnnnnnnnnnnnnnnnnnnnnnnnnnnnnnnnnnnnnnnnnnnnnnnnnnnnnnnnnnnnnnnnnnnnnnnnnnnnnnnnnnnnnnnnnnnnnnnnnnnnnnnnnnnnnnnnnnnnnnnnnnnnnnnnnnnnnnnnnnnnnnnnnnnnnnnnnnnnnnnnnnnnnnnnnnnnnnnnnnnnnnnnnnnnnnnnnnnnnnnnnnnnnnnnnnnnnnnnnnnnnnnnnnnnnnnnnnnnnnnnnnnnnnnnnnnnnnnnnnnnnnnnnnnnnnnnnnnnnnnnnnnnnnnnnnnnnnnnnnnnnnnnnnnnnnnnnnnnnnnnnnnnnnnnnnnnnnnnnnnnnnnnnnnnnnnnnnnnnnnnnnnnnnnnnnnnnnnnnnnnnnnnnnnnnnnnnnnnnnnnnnnnnnnnnnnnnnnnnnnnnnnnnnnnnnnnnnnnnnnnnnnnnnnnnnnnnnnnnnnnnnnnnnnnnnnnnnnnnnnnnnnnnnnnnnnnnnnnnnnnnnnnnnnnnnnnnnnnnnnnnnnnnnnnnnnnnnnnnnnnnnnnnnnnnnnnnnnnnnnnnnnnnnnnnnnnnnnnnnnnnnnnnnnnnnnnnnnnnnnnnnnnnnnnnnnnnnnnnnnnnnnnnnnnnnnnnnnnnnnnnnnnnnnnnnnnnnnnnnnnnnnnnnnnnnnnnnnnnnnnnnnnnnnnnnnnnnnnnnnnnnnnnnnnnnnnnnnnnnnnnnnnnnnnnnnnnnnnnnnnnnnnnnnnnnnnnnnnnnnnnnnnnnnnnnnnnnnnnnnnnnnnnnnnnnnnnnnnnnnnnnnnnnnnnnnnnnnnnnnnnnnnnnnnnnnnnnnnnnnnnnnnnnnnnnnnnnnnnnnnnnnnnnnnnnnnnnnnnnnnnnnnnnnnnnnnnnnnnnnnnnnnnnnnnnnnnnnnnnnnnnnnnnnnnnnnnnnnnnnnnnnnnnnnnnnnnnnnnnnnnnnnnnnnnnnnnnnnnnnnnnnnnnnnnnnnnnnnnnnnnnnnnnnnnnnnnnnnnnnnnnnnnnnnnnnnnnnnnnnnnnnnnnnnnnnnnnnnnnnnnnnnnnnnnnnnnnnnnnnnnnnnnnnnnnnnnnnnnnnnnnnnnnnnnnnnnnnnnnnnnnnnnnnnnnnnnnnnnnnnnnnnnnnnnnnnnnnnnnnnnnnnnnnnnnnnnnnnnnnnnnnnnnnnnnnnnnnnnnnnnnnnnnnnnnnnnnnnnnnnnnnnnnnnnnnnnnnnnnnnnnnnnnnnnnnnnnnnnnnnnnnnnnnnnnnnnnnnnnnnnnnnnnnnnnnnnnnnnnnnnnnnnnnnnnnnnnnnnnnnnnnnnnnnnnnnnnnnnnnnnnnnnnnnnnnnnnnnnnnnnnnnnnnnnnnnnnnnnnnnnnnnnnnnnnnnnnnnnnnnnnnnnnnnnnnnnnnnnnnnnnnnnnnnnnnnnnnnnnnnnnnnnnnnnnnnnnnnnnnnnnnnnnnnnnnnnnnnnnnnnnnnnnnnnnnnnnnnnnnnnnnnnnnnnnnnnnnnnnnnnnnnnnnnnnnnnnnnnnnnnnnnnnnnnnnnnnnnnnnnnnnnnnnnnnnnnnnnnnnnnnnnnnnnnnnnnnnnnnnnnnnnnnnnnnnnnnnnnnnnnnnnnnnnnnnnnnnnnnnnnnnnnnnnnnnnnnnnnnnnnnnnnnnnnnnnnnnnnnnnnnnnnnnnnnnnnnnnnnnnnnnnnnnnnnnnnnnnnnnnnnnnnnnnnnnnnnnnnnnnnnnnnnnnnnnnnnnnnnnnnnnnnnnnnnnnnnnnnnnnnnnnnnnnnnnnnnnnnnnnnnnnnnnnnnnnnnnnnnnnnnnnnnnnnnnnnnnnnnnnnnnnnnnnnnnnnnnnnnnnnnnnnnnnnnnnnnnnnnnnnnnnnnnnnnnnnnnnnnnnnnnnnnnnnnnnnnnnnnnnnnnnnnnnnnnnnnnnnnnnnnnnnnnnnnnnnnnnnnnnnnnnnnnnnnnnnnnnnnnnnnnnnnnnnnnnnnnnnnnnnnnnnnnnnnnnnnnnnnnnnnnnnnnnnnnnnnnnnnnnnnnnnnnnnnnnnnnnnnnnnnnnnnnnnnnnnnnnnnnnnnnnnnnnnnnnnnnnnnnnnnnnnnnnnnnnnnnnnnnnnnnnnnnnnnnnnnnnnnnnnnnnnnnnnnnnnnnnnnnnnnnnnnnnnnnnnnnnnnnnnnnnnnnnnnnnnnnnnnnnnnnnnnnnnnnnnnnnnnnnnnnnnnnnnnnnnnnnnnnnnnnnnnnnnnnnnnnnnnnnnnnnnnnnnnnnnnnnnnnnnnnnnnnnnnnnnnnnnnnnnnnnnnnnnnnnnnnnnnnnnnnnnnnnnnnnnnnnnnnnnnnnnnnnnnnnnnnnnnnnnnnnnnnnnnnnnnnnnnnnnnnnnnnnnnnnnnnnnnnnnnnnnnnnnnnnnnnnnnnnnnnnnnnnnnnnnnnnnnnnnnnnnnnnnnnnnnnnnnnnnnnnnnnnnnnnnnnnnnnnnnnnnnnnnnnnnnnnnnnnnnnnnnnnnnnnnnnnnnnnnnnnnnnnnnnnnnnnnnnnnnnnnnnnnnnnnnnnnnnnnnnnnnnnnnnnnnnnnnnnnnnnnnnnnnnnnnnnnnnnnnnnnnnnnnnnnnnnnnnnnnnnnnnnnnnnnnnnnnnnnnnnnnnnnnnnnnnnnnnnnnnnnnnnnnnnnnnnnnnnnnnnnnnnnnnnnnnnnnnnnnnnnnnnnnnnnnnnnnnnnnnnnnnnnnnnnnnnnnnnnnnnnnnnnnnnnnnnnnnnnnnnnnnnnnnnnnnnnnnnnnnnnnnnnnnnnnnnnnnnnnnnnnnnnnnnnnnnnnnnnnnnnnnnnnnnnnnnnnnnnnnnnnnnnnnnnnnnnnnnnnnnnnnnnnnnnnnnnnnnnnnnnnnnnnnnnnnnnnnnnnnnnnnnnnnnnnnnnnnnnnnnnnnnnnnnnnnnnnnnnnnnnnnnnnnnnnnnnnnnnnnnnnnnnnnnnnnnnnnnnnnnnnnnnnnnnnnnnnnnnnnnnnnnnnnnnnnnnnnnnnnnnnnnnnnnnnnnnnnnnnnnnnnnnnnnnnnnnnnnnnnnnnnnnnnnnnnnnnnnnnnnnnnnnnnnnnnnnnnnnnnnnnnnnnnnnnnnnnnnnnnnnnnnnnnnnnnnnnnnnnnnnnnnnnnnnnnnnnnnnnnnnnnnnnnnnnnnnnnnnnnnnnnnnnnnnnnnnnnnnnnnnnnnnnnnnnnnnnnnnnnnnnnnnnnnnnnnnnnnnnnnnnnnnnnnnnnnnnnnnnnnnnnnnnnnnnnnnnnnnnnnnnnnnnnnnnnnnnnnnnnnnnnnnnnnnnnnnnnnnnnnnnnnnnnnnnnnnnnnnnnnnnnnnnnnnnnnnnnnnnnnnnnnnnnnnnnnnnnnnnnnnnnnnnnnnnnnnnnnnnnnnnnnnnnnnnnnnnnnnnnnnnnnnnnnnnnnnnnnnnnnnnnnnnnnnnnnnnnnnnnnnnnnnnnnnnnnnnnnnnnnnnnnnnnnnnnnnnnnnnnnnnnnnnnnnnnnnnnnnnnnnnnnnnnnnnnnnnnnnnnnnnnnnnnnnnnnnnnnnnnnnnnnnnnnnnnnnnnnnnnnnnnnnnnnnnnnnnnnnnnnnnnnnnnnnnnnnnnnnnnnnnnnnnnnnnnnnnnnnnnnnnnnnnnnnnnnnnnnnnnnnnnnnnnnnnnnnnnnnnnnnnnnnnnnnnnnnnnnnnnnnnnnnnnnnnnnnnnnnnnnnnnnnnnnnnnnnnnnnnnnnnnnnnnnnnnnnnnnnnnnnnnnnnnnnnnnnnnnnnnnnnnnnnnnnnnnnnnnnnnnnnnnnnnnnnnnnnnnnnnnnnnnnnnnnnnnnnnnnnnnnnnnnnnnnnnnnnnnnnnnnnnnnnnnnnnnnnnnnnnnnnnnnnnnnnnnnnnnnnnnnnnnnnnnnnnnnnnnnnnnnnnnnnnnnnnnnnnnnnnnnnnnnnnnnnnnnnnnnnnnnnnnnnnnnnnnnnnnnnnnnnnnnnnnnnnnnnnnnnnnnnnnnnnnnnnnnnnnnnnnnnnnnnnnnnnnnnnnnnnnnnnnnnnnnnnnnnnnnnnnnnnnnnnnnnnnnnnnnnnnnnnnnnnnnnnnnnnnnnnnnnnnnnnnnnnnnnnnnnnnnnnnnnnnnnnnnnnnnnnnnnnnnnnnnnnnnnnnnnnnnnnnnnnnnnnnnnnnnnnnnnnnnnnnnnnnnnnnnnnnnnnnnnnnnnnnnnnnnnnnnnnnnnnnnnnnnnnnnnnnnnnnnnnnnnnnnnnnnnnnnnnnnnnnnnnnnnnnnnnnnnnnnnnnnnnnnnnnnnnnnnnnnnnnnnnnnnnnnnnnnnnnnnnnnnnnnnnnnnnnnnnnnnnnnnnnnnnnnnnnnnnnnnnnnnnnnnnnnnnnnnnnnnnnnnnnnnnnnnnnnnnnnnnnnnnnnnnnnnnnnnnnnnnnnnnnnnnnnnnnnnnnnnnnnnnnnnnnnnnnnnnnnnnnnnnnnnnnnnnnnnnnnnnnnnnnnnnnnnnnnnnnnnnnnnnnnnnnnnnnnnnnnnnnnnnnnnnnnnnnnnnnnnnnnnnnnnnnnnnnnnnnnnnnnnnnnnnnnnnnnnnnnnnnnnnnnnnnnnnnnnnnnnnnnnnnnnnnnnnnnnnnnnnnnnnnnnnnnnnnnnnnnnnnnnnnnnnnnnnnnnnnnnnnnnnnnnnnnnnnnnnnnnnnnnnnnnnnnnnnnnnnnnnnnnnnnnnnnnnnnnnnnnnnnnnnnnnnnnnnnnnnnnnnnnnnnnnnnnnnnnnnnnnnnnnnnnnnnnnnnnnnnnnnnnnnnnnnnnnnnnnnnnnnnnnnnnnnnnnnnnnnnnnnnnnnnnnnnnnnnnnnnnnnnnnnnnnnnnnnnnnnnnnnnnnnnnnnnnnnnnnnnnnnnnnnnnnnnnnnnnnnnnnnnnnnnnnnnnnnnnnnnnnnnnnnnnnnnnnnnnnnnnnnnnnnnnnnnnnnnnnnnnnnnnnnnnnnnnnnnnnnnnnnnnnnnnnnnnnnnnnnnnnnnnnnnnnnnnnnnnnnnnnnnnnnnnnnnnnnnnnnnnnnnnnnnnnnnnnnnnnnnnnnnnnnnnnnnnnnnnnnnnnnnnnnnnnnnnnnnnnnnnnnnnnnnnnnnnnnnnnnnnnnnnnnnnnnnnnnnnnnnnnnnnnnnnnnnnnnnnnnnnnnnnnnnnnnnnnnnnnnnnnnnnnnnnnnnnnnnnnnnnnnnnnnnnnnnnnnnnnnnnnnnnnnnnnnnnnnnnnnnnnnnnnnnnnnnnnnnnnnnnnnnnnnnnnnnnnnnnnnnnnnnnnnnnnnnnnnnnnnnnnnnnnnnnnnnnnnnnnnnnnnnnnnnnnnnnnnnnnnnnnnnnnnnnnnnnnnnnnnnnnnnnnnnnnnnnnnnnnnnnnnnnnnnnnnnnnnnnnnnnnnnnnnnnnnnnnnnnnnnnnnnnnnnnnnnnnnnnnnnnnnnnnnnnnnnnnnnnnnnnnnnnnnnnnnnnnnnnnnnnnnnnnnnnnnnnnnnnnnnnnnnnnnnnnnnnnnnnnnnnnnnnnnnnnnnnnnnnnnnnnnnnnnnnnnnnnnnnnnnnnnnnnnnnnnnnnnnnnnnnnnnnnnnnnnnnnnnnnnnnnnnnnnnnnnnnnnnnnnnnnnnnnnnnnnnnnnnnnnnnnnnnnnnnnnnnnnnnnnnnnnnnnnnnnnnnnnnnnnnnnnnnnnnnnnnnnnnnnnnnnnnnnnnnnnnnnnnnnnnnnnnnnnnnnnnnnnnnnnnnnnnnnnnnnnnnnnnnnnnnnnnnnnnnnnnnnnnnnnnnnnnnnnnnnnnnnnnnnnnnnnnnnnnnnnnnnnnnnnnnnnnnnnnnnnnnnnnnnnnnnnnnnnnnnnnnnnnnnnnnnnnnnnnnnnnnnnnnnnnnnnnnnnnnnnnnnnnnnnnnnnnnnnnnnnnnnnnnnnnnnnnnnnnnnnnnnnnnnnnnnnnnnnnnnnnnnnnnnnnnnnnnnnnnnnnnnnnnnnnnnnnnnnnnnnnnnnnnnnnnnnnnnnnnnnnnnnnnnnnnnnnnnnnnnnnnnnnnnnnnnnnnnnnnnnnnnnnnnnnnnnnnnnnnnnnnnnnnnnnnnnnnnnnnnnnnnnnnnnnnnnnnnnnnnnnnnnnnnnnnnnnnnnnnnnnnnnnnnnnnnnnnnnnnnnnnnnnnnnnnnnnnnnnnnnnnnnnnnnnnnnnnnnnnnnnnnnnnnnnnnnnnnnnnnnnnnnnnnnnnnnnnnnnnnnnnnnnnnnnnnnnnnnnnnnnnnnnnnnnnnnnnnnnnnnnnnnnnnnnnnnnnnnnnnnnnnnnnnnnnnnnnnnnnnnnnnnnnnnnnnnnnnnnnnnnnnnnnnnnnnnnnnnnnnnnnnnnnnnnnnnnnnnnnnnnnnnnnnnnnnnnnnnnnnnnnnnnnnnnnnnnnnnnnnnnnnnnnnnnnnnnnnnnnnnnnnnnnnnnnnnnnnnnnnnnnnnnnnnnnnnnnnnnnnnnnnnnnnnnnnnnnnnnnnnnnnnnnnnnnnnnnnnnnnnnnnnnnnnnnnnnnnnnnnnnnnnnnnnnnnnnnnnnnnnnnnnnnnnnnnnnnnnnnnnnnnnnnnnnnnnnnnnnnnnnnnnnnnnnnnnnnnnnnnnnnnnnnnnnnnnnnnnnnnnnnnnnnnnnnnnnnnnnnnnnnnnnnnnnnnnnnnnnnnnnnnnnnnnnnnnnnnnnnnnnnnnnnnnnnnnnnnnnnnnnnnnnnnnnnnnnnnnnnnnnnnnnnnnnnnnnnnnnnnnnnnnnnnnnnnnnnnnnnnnnnnnnnnnnnnnnnnnnnnnnnnnnnnnnnnnnnnnnnnnnnnnnnnnnnnnnnnnnnnnnnnnnnnnnnnnnnnnnnnnnnnnnnnnnnnnnnnnnnnnnnnnnnnnnnnnnnnnnnnnnnnnnnnnnnnnnnnnnnnnnnnnnnnnnnnnnnnnnnnnnnnnnnnnnnnnnnnnnnnnnnnnnnnnnnnnnnnnnnnnnnnnnnnnnnnnnnnnnnnnnnnnnnnnnnnnnnnnnnnnnnnnnnnnnnnnnnnnnnnnnnnnnnnnnnnnnnnnnnnnnnnnnnnnnnnnnnnnnnnnnnnnnnnnnnnnnnnnnnnnnnnnnnnnnnnnnnnnnnnnnnnnnnnnnnnnnnnnnnnnnnnnnnnnnnnnnnnnnnnnnnnnnnnnnnnnnnnnnnnnnnnnnnnnnnnnnnnnnnnnnnnnnnnnnnnnnnnnnnnnnnnnnnnnnnnnnnnnnnnnnnnnnnnnnnnnnnnnnnnnnnnnnnnnnnnnnnnnnnnnnnnnnnnnnnnnnnnnnnnnnnnnnnnnnnnnnnnnnnnnnnnnnnnnnnnnnnnnnnnnnnnnnnnnnnnnnnnnnnnnnnnnnnnnnnnnnnnnnnnnnnnnnnnnnnnnnnnnnnnnnnnnnnnnnnnnnnnnnnnnnnnnnnnnnnnnnnnnnnnnnnnnnnnnnnnnnnnnnnnnnnnnnnnnnnnnnnnnnnnnnnnnnnnnnnnnnnnnnnnnnnnnnnnnnnnnnnnnnnnnnnnnnnnnnnnnnnnnnnnnnnnnnnnnnnnnnnnnnnnnnnnnnnnnnnnnnnnnnnnnnnnnnnnnnnnnnnnnnnnnnnnnnnnnnnnnnnnnnnnnnnnnnnnnnnnnnnnnnnnnnnnnnnnnnnnnnnnnnnnnnnnnnnnnnnnnnnnnnnnnnnnnnnnnnnnnnnnnnnnnnnnnnnnnnnnnnnnnnnnnnnnnnnnnnnnnnnnnnnnnnnnnnnnnnnnnnnnnnnnnnnnnnnnnnnnnnnnnnnnnnnnnnnnnnnnnnnnnnnnnnnnnnnnnnnnnnnnnnnnnnnnnnnnnnnnnnnnnnnnnnnnnnnnnnnnnnnnnnnnnnnnnnnnnnnnnnnnnnnnnnnnnnnnnnnnnnnnnnnnnnnnnnnnnnnnnnnnnnnnnnnnnnnnnnnnnnnnnnnnnnnnnnnnnnnnnnnnnnnnnnnnnnnnnnnnnnnnnnnnnnnnnnnnnnnnnnnnnnnnnnnnnnnnnnnnnnnnnnnnnnnnnnnnnnnnnnnnnnnnnnnnnnnnnnnnnnnnnnnnnnnnnnnnnnnnnnnnnnnnnnnnnnnnnnnnnnnnnnnnnnnnnnnnnnnnnnnnnnnnnnnnnnnnnnnnnnnnnnnnnnnnnnnnnnnnnnnnnnnnnnnnnnnnnnnnnnnnnnnnnnnnnnnnnnnnnnnnnnnnnnnnnnnnnnnnnnnnnnnnnnnnnnnnnnnnnnnnnnnnnnnnnnnnnnnnnnnnnnnnnnnnnnnnnnnnnnnnnnnnnnnnnnnnnnnnnnnnnnnnnnnnnnnnnnnnnnnnnnnnnnnnnnnnnnnnnnnnnnnnnnnnnnnnnnnnnnnnnnnnnnnnnnnnnnnnnnnnnnnnnnnnnnnnnnnnnnnnnnnnnnnnnnnnnnnnnnnnnnnnnnnnnnnnnnnnnnnnnnnnnnnnnnnnnnnnnnnnnnnnnnnnnnnnnnnnnnnnnnnnnnnnnnnnnnnnnnnnnnnnnnnnnnnnnnnnnnnnnnnnnnnnnnnnnnnnnnnnnnnnnnnnnnnnnnnnnnnnnnnnnnnnnnnnnnnnnnnnnnnnnnnnnnnnnnnnnnnnnnnnnnnnnnnnnnnnnnnnnnnnnnnnnnnnnnnnnnnnnnnnnnnnnnnnnnnnnnnnnnnnnnnnnnnnnnnnnnnnnnnnnnnnnnnnnnnnnnnnnnnnnnnnnnnnnnnnnnnnnnnnnnnnnnnnnnnnnnnnnnnnnnnnnnnnnnnnnnnnnnnnnnnnnnnnnnnnnnnnnnnnnnnnnnnnnnnnnnnnnnnnnnnnnnnnnnnnnnnnnnnnnnnnnnnnnnnnnnnnnnnnnnnnnnnnnnnnnnnnnnnnnnnnnnnnnnnnnnnnnnnnnnnnnnnnnnnnnnnnnnnnnnnnnnnnnnnnnnnnnnnnnnnnnnnnnnnnnnnnnnnnnnnnnnnnnnnnnnnnnnnnnnnnnnnnnnnnnnnnnnnnnnnnnnnnnnnnnnnnnnnnnnnnnnnnnnnnnnnnnnnnnnnnnnnnnnnnnnnnnnnnnnnnnnnnnnnnnnnnnnnnnnnnnnnnnnnnnnnnnnnnnnnnnnnnnnnnnnnnnnnnnnnnnnnnnnnnnnnnnnnnnnnnnnnnnnnnnnnnnnnnnnnnnnnnnnnnnnnnnnnnnnnnnnnnnnnnnnnnnnnnnnnnnnnnnnnnnnnnnnnnnnnnnnnnnnnnnnnnnnnnnnnnnnnnnnnnnnnnnnnnnnnnnnnnnnnnnnnnnnnnnnnnnnnnnnnnnnnnnnnnnnnnnnnnnnnnnnnnnnnnnnnnnnnnnnnnnnnnnnnnnnnnnnnnnnnnnnnnnnnnnnnnnnnnnnnnnnnnnnnnnnnnnnnnnnnnnnnnnnnnnnnnnnnnnnnnnnnnnnnnnnnnnnnnnnnnnnnnnnnnnnnnnnnnnnnnnnnnnnnnnnnnnnnnnnnnnnnnnnnnnnnnnnnnnnnnnnnnnnnnnnnnnnnnnnnnnnnnnnnnnnnnnnnnnnnnnnnnnnnnnnnnnnnnnnnnnnnnnnnnnnnnnnnnnnnnnnnnnnnnnnnnnnnnnnnnnnnnnnnnnnnnnnnnnnnnnnnnnnnnnnnnnnnnnnnnnnnnnnnnnnnnnnnnnnnnnnnnnnnnnnnnnnnnnnnnnnnnnnnnnnnnnnnnnnnnnnnnnnnnnnnnnnnnnnnnnnnnnnnnnnnnnnnnnnnnnnnnnnnnnnnnnnnnnnnnnnnnnnnnnnnnnnnnnnnnnnnnnnnnnnnnnnnnnnnnnnnnnnnnnnnnnnnnnnnnnnnnnnnnnnnnnnnnnnnnnnnnnnnnnnnnnnnnnnnnnnnnnnnnnnnnnnnnnnnnnnnnnnnnnnnnnnnnnnnnnnnnnnnnnnnnnnnnnnnnnnnnnnnnnnnnnnnnnnnnnnnnnnnnnnnnnnnnnnnnnnnnnnnnnnnnnnnnnnnnnnnnnnnnnnnnnnnnnnnnnnnnnnnnnnnnnnnnnnnnnnnnnnnnnnnnnnnnnnnnnnnnnnnnnnnnnnnnnnnnnnnnnnnnnnnnnnnnnnnnnnnnnnnnnnnnnnnnnnnnnnnnnnnnnnnnnnnnnnnnnnnnnnnnnnnnnnnnnnnnnnnnnnnnnnnnnnnnnnnnnnnnnnnnnnnnnnnnnnnnnnnnnnnnnnnnnnnnnnnnnnnnnnnnnnnnnnnnnnnnnnnnnnnnnnnnnnnnnnnnnnnnnnnnnnnnnnnnnnnnnnnnnnnnnnnnnnnnnnnnnnnnnnnnnnnnnnnnnnnnnnnnnnnnnnnnnnnnnnnnnnnnnnnnnnnnnnnnnnnnnnnnnnnnnnnnnnnnnnnnnnnnnnnnnnnnnnnnnnnnnnnnnnnnnnnnnnnnnnnnnnnnnnnnnnnnnnnnnnnnnnnnnnnnnnnnnnnnnnnnnnnnnnnnnnnnnnnnnnnnnnnnnnnnnnnnnnnnnnnnnnnnnnnnnnnnnnnnnnnnnnnnnnnnnnnnnnnnnnnnnnnnnnnnnnnnnnnnnnnnnnnnnnnnnnnnnnnnnnnnnnnnnnnnnnnnnnnnnnnnnnnnnnnnnnnnnnnnnnnnnnnnnnnnnnnnnnnnnnnnnnnnnnnnnnnnnnnnnnnnnnnnnnnnnnnnnnnnnnnnnnnnnnnnnnnnnnnnnnnnnnnnnnnnnnnnnnnnnnnnnnnnnnnnnnnnnnnnnnnnnnnnnnnnnnnnnnnnnnnnnnnnnnnnnnnnnnnnnnnnnnnnnnnnnnnnnnnnnnnnnnnnnnnnnnnnnnnnnnnnnnnnnnnnnnnnnnnnnnnnnnnnnnnnnnnnnnnnnnnnnnnnnnnnnnnnnnnnnnnnnnnnnnnnnnnnnnnnnnnnnnnnnnnnnnnnnnnnnnnnnnnnnnnnnnnnnnnnnnnnnnnnnnnnnnnnnnnnnnnnnnnnnnnnnnnnnnnnnnnnnnnnnnnnnnnnnnnnnnnnnnnnnnnnnnnnnnnnnnnnnnnnnnnnnnnnnnnnnnnnnnnnnnnnnnnnnnnnnnnnnnnnnnnnnnnnnnnnnnnnnnnnnnnnnnnnnnnnnnnnnnnnnnnnnnnnnnnnnnnnnnnnnnnnnnnnnnnnnnnnnnnnnnnnnnnnnnnnnnnnnnnnnnnnnnnnnnnnnnnnnnnnnnnnnnnnnnnnnnnnnnnnnnnnnnnnnnnnnnnnnnnnnnnnnnnnnnnnnnnnnnnnnnnnnnnnnnnnnnnnnnnnnnnnnnnnnnnnnnnnnnnnnnnnnnnnnnnnnnnnnnnnnnnnnnnnnnnnnnnnnnnnnnnnnnnnnnnnnnnnnnnnnnnnnnnnnnnnnnnnnnnnnnnnnnnnnnnnnnnnnnnnnnnnnnnnnnnnnnnnnnnnnnnnnnnnnnnnnnnnnnnnnnnnnnnnnnnnnnnnnnnnnnnnnnnnnnnnnnnnnnnnnnnnnnnnnnnnnnnnnnnnnnnnnnnnnnnnnnnnnnnnnnnnnnnnnnnnnnnnnnnnnnnnnnnnnnnnnnnnnnnnnnnnnnnnnnnnnnnnnnnnnnnnnnnnnnnnnnnnnnnnnnnnnnnnnnnnnnnnnnnnnnnnnnnnnnnnnnnnnnnnnnnnnnnnnnnnnnnnnnnnnnnnnnnnnnnnnnnnnnnnnnnnnnnnnnnnnnnnnnnnnnnnnnnnnnnnnnnnnnnnnnnnnnnnnnnnnnnnnnnnnnnnnnnnnnnnnnnnnnnnnnnnnnnnnnnnnnnnnnnnnnnnnnnnnnnnnnnnnnnnnnnnnnnnnnnnnnnnnnnnnnnnnnnnnnnnnnnnnnnnnnnnnnnnnnnnnnnnnnnnnnnnnnnnnnnnnnnnnnnnnnnnnnnnnnnnnnnnnnnnnnnnnnnnnnnnnnnnnnnnnnnnnnnnnnnnnnnnnnnnnnnnnnnnnnnnnnnnnnnnnnnnnnnnnnnnnnnnnnnnnnnnnnnnnnnnnnnnnnnnnnnnnnnnnnnnnnnnnnnnnnnnnnnnnnnnnnnnnnnnnnnnnnnnnnnnnnnnnnnnnnnnnnnnnnnnnnnnnnnnnnnnnnnnnnnnnnnnnnnnnnnnnnnnnnnnnnnnnnnnnnnnnnnnnnnnnnnnnnnnnnnnnnnnnnnnnnnnnnnnnnnnnnnnnnnnnnnnnnnnnnnnnnnnnnnnnnnnnnnnnnnnnnnnnnnnnnnnnnnnnnnnnnnnnnnnnnnnnnnnnnnnnnnnnnnnnnnnnnnnnnnnnnnnnnnnnnnnnnnnnnnnnnnnnnnnnnnnnnnnnnnnnnnnnnnnnnnnnnnnnnnnnnnnnnnnnnnnnnnnnnnnnnnnnnnnnnnnnnnnnnnnnnnnnnnnnnnnnnnnnnnnnnnnnnnnnnnnnnnnnnnnnnnnnnnnnnnnnnnnnnnnnnnnnnnnnnnnnnnnnnnnnnnnnnnnnnnnnnnnnnnnnnnnnnnnnnnnnnnnnnnnnnnnnnnnnnnnnnnnnnnnnnnnnnnnnnnnnnnnnnnnnnnnnnnnnnnnnnnnnnnnnnnnnnnnnnnnnnnnnnnnnnnnnnnnnnnnnnnnnnnnnnnnnnnnnnnnnnnnnnnnnnnnnnnnnnnnnnnnnnnnnnnnnnnnnnnnnnnnnnnnnnnnnnnnnnnnnnnnnnnnnnnnnnnnnnnnnnnnnnnnnnnnnnnnnnnnnnnnnnnnnnnnnnnnnnnnnnnnnnnnnnnnnnnnnnnnnnnnnnnnnnnnnnnnnnnnnnnnnnnnnnnnnnnnnnnnnnnnnnnnnnnnnnnnnnnnnnnnnnnnnnnnnnnnnnnnnnnnnnnnnnnnnnnnnnnnnnnnnnnnnnnnnnnnnnnnnnnnnnnnnnnnnnnnnnnnnnnnnnnnnnnnnnnnnnnnnnnnnnnnnnnnnnnnnnnnnnnnnnnnnnnnnnnnnnnnnnnnnnnnnnnnnnnnnnnnnnnnnnnnnnnnnnnnnnnnnnnnnnnnnnnnnnnnnnnnnnnnnnnnnnnnnnnnnnnnnnnnnnnnnnnnnnnnnnnnnnnnnnnnnnnnnnnnnnnnnnnnnnnnnnnnnnnnnnnnnnnnnnnnnnnnnnnnnnnnnnnnnnnnnnnnnnnnnnnnnnnnnnnnnnnnnnnnnnnnnnnnnnnnnnnnnnnnnnnnnnnnnnnnnnnnnnnnnnnnnnnnnnnnnnnnnnnnnnnnnnnnnnnnnnnnnnnnnnnnnnnnnnnnnnnnnnnnnnnnnnnnnnnnnnnnnnnnnnnnnnnnnnnnnnnnnnnnnnnnnnnnnnnnnnnnnnnnnnnnnnnnnnnnnnnnnnnnnnnnnnnnnnnnnnnnnnnnnnnnnnnnnnnnnnnnnnnnnnnnnnnnnnnnnnnnnnnnnnnnnnnnnnnnnnnnnnnnnnnnnnnnnnnnnnnnnnnnnnnnnnnnnnnnnnnnnnnnnnnnnnnnnnnnnnnnnnnnnnnnnnnnnnnnnnnnnnnnnnnnnnnnnnnnnnnnnnnnnnnnnnnnnnnnnnnnnnnnnnnnnnnnnnnnnnnnnnnnnnnnnnnnnnnnnnnnnnnnnnnnnnnnnnnnnnnnnnnnnnnnnnnnnnnnnnnnnnnnnnnnnnnnnnnnnnnnnnnnnnnnnnnnnnnnnnnnnnnnnnnnnnnnnnnnnnnnnnnnnnnnnnnnnnnnnnnnnnnnnnnnnnnnnnnnnnnnnnnnnnnnnnnnnnnnnnnnnnnnnnnnnnnnnnnnnnnnnnnnnnnnnnnnnnnnnnnnnnnnnnnnnnnnnnnnnnnnnnnnnnnnnnnnnnnnnnnnnnnnnnnnnnnnnnnnnnnnnnnnnnnnnnnnnnnnnnnnnnnnnnnnnnnnnnnnnnnnnnnnnnnnnnnnnnnnnnnnnnnnnnnnnnnnnnnnnnnnnnnnnnnnnnnnnnnnnnnnnnnnnnnnnnnnnnnnnnnnnnnnnnnnnnnnnnnnnnnnnnnnnnnnnnnnnnnnnnnnnnnnnnnnnnnnnnnnnnnnnnnnnnnnnnnnnnnnnnnnnnnnnnnnnnnnnnnnnnnnnnnnnnnnnnnnnnnnnnnnnnnnnnnnnnnnnnnnnnnnnnnnnnnnnnnnnnnnnnnnnnnnnnnnnnnnnnnnnnnnnnnnnnnnnnnnnnnnnnnnnnnnnnnnnnnnnnnnnnnnnnnnnnnnnnnnnnnnnnnnnnnnnnnnnnnnnnnnnnnnnnnnnnnnnnnnnnnnnnnnnnnnnnnnnnnnnnnnnnnnnnnnnnnnnnnnnnnnnnnnnnnnnnnnnnnnnnnnnnnnnnnnnnnnnnnnnnnnnnnnnnnnnnnnnnnnnnnnnnnnnnnnnnnnnnnnnnnnnnnnnnggcggcgtcgatgttttcccccttgagggcggagacggagacccagggcagtccccgttcctcgcaccaggcgatattggcgggggcaggctcgcgcaaatccctgtggttaaagaccattaacagcggtatcttcatctcgcggatgcgtttcagggaggacagctcgctctccgcgaaggggcggccatcgttcacaaacacggctatgtccgtgcggtaaagtatcttataggtggcgagtacccgtttttcgcccagttcgccgctgtcgtccagtccagcggtgtcaaagaaggtcaccgggcccaggggcagaagttcatagcgtttgtccaccgggtctgtggtggtgcccggggtgctggaaacgatggctatctcctgtcctgccagggcgttgatcaaggacgattttccagcgttgcggttacccagcagggtgatgtttacgcgttctccgcggggtgtgctcatctatcttctcccaaaaagtcttgcggcttgcggccgctaatagcttttattatcagttctttcatgtttctttccttgtcggactggataccagcccatgtaaaaataatatatgtgaaaagcgcgaatctgtcaagcaaagagaattctggcagacaggggcctgtgtttttgatatatccacaaattacacaaattaacacggattaaaagaacagaataaggacaagtgtccagcctaaaaacaacaaccagaccctgaaacaaaccgccaccaagccctaaagccgtgtcatcccgggctgtcggggtcaccgccaaagcgcgaagcggtttggtggggtggcttgacccgggatccagtcttttaaaaacaaccagcaagccccgaaacaaagcacaacagactaaaaaccgtgtcatcccgggctgtcggggtccccgccaaagcgcgaagcggtttggtggggtggcttgacccgggatccagtcttttagaaacaaacgcgtaaggttttaaaaaagcaggcacctttccacctcaaaacacctttccacaaattctccccccatatatataggtgctacgaccccttcatgccaggcgggaagcggatcccagggcaagtatatatatacttgcccgtaattgcgcggccatgggctggctgccctccctttcccctcgcgcgcgggtggctctcatttgcatccagcgttttggcgtgagtcttccttaggtcatccttataatttataaggttgacctaaggatgatggcatcaaatccagtagcagcaaaggagggcggtatgaaggattatgcggaaggttgtggtatttttgtggaaaggtggaaaggtgcccccgaaacaagtccaccaagttatattttgtgtcatcacgggaagtcggggccccctctggggtggcttacccgtgatccagtctttttaaaagaaacatccacaaattacacaaattaacacgaattaaaagaacattaaagagtcaacacacccgactccggaacaaaaccctccagactaaaaaccgtgtcatcacagcctgcgagccgtgatccagtgcccaggtgtggcaaagtccgtttgccacagagaccggaggtctcttccaaacaggcaactccgttgcctctgccgaacggacttcggcaacccttatattacaccaatccgtgtcaatctgcgccctttatccgcgtttatctgcgtgaaccgtggaacccgggatccagtcttttggaatgtttgaacttcgctgaaaacatttttcgctaccaggaatgaaaactggacaacaaacgcagcttgggatatctgacactaagagtgtaattcacacgatcaataagaacatagcgtgctgtgcatacaaaacatattaccgacggacttctgttctgaaatatggacgttttgaacttggtaaacagtccgtatatggactaccagctgggacttgccattaggcatatgcccgaatgtaaagctatattcttatataacgcattgtagacagcacaggttgttctctgctctttccatattacactagtggtcatcatttcaccagtaggggtttttttacgcttttttcccgggagttttcatgtaaagcaccctactggacaaagagatgggagccggaaaacacagcctgaactgggacggcaccgactccaacggcgcccaactggcaagcggagtctatatctaccgcctcagcaccggaaagacgagcgccagccgcaaaatgatattgctgaagtgacggacagccgcccttccaagtccgataattaacttgaaccgccgcgcattacacacggcggttctttccaacaagccaagtatcagcagcgggaaaactgcgctgaaaaagccgctggtggggctccgtaaaatgggagtggaagccgccgcatggaacaccttgaaagtaacaagataccgccccaaattgatctttcctaacccaaaatccgcaaagcaaatttcttgacaatgatctttggcttaaatataaggttcctatcgaacaaaaggagcatgttatgtacaatcttctttgtgataattgggtaaacgtggtctatctttcgggcaaaccagatagaatatctttagttcaaactcttgaagacgcacactgtctgcaactggcatacagcaatcctatggaccggttcgctgttttcagattcctgcttgctcttggctactggtgtttcgccaacaccaacggggagcctgaacctgataagccgcttccgacctcctggatatcctggctggaagaaaacaaggggtatttcgagctttttggggatggacagagatttttccaagccgatcccagttccaggatcagagccattaccgaccttattcatgagataccaacagctcacaacctatgccatttcaatcatgtcaccgactatatcgatgggctctgcgaagcttgctgcatcaagggactgctgagattacctgtctttaccactgtcggtggcagagggataggcgcgggaatcaacaacactcctccattttacctgctctggcatgcaaatgacctcgctggcatgctggttcaaaattggcaaccctgggataatatggggattccggcatggttgggttcttttcaaaaagaaagcaggaaagtgggcttacttgccggaatgacctggctgccgcgcaaggtgcatctgcatgatcctgtctcaggtcaggcagcatgttgttcctgcggcttaccctccaaagctctcgtctattcctgcagcataaaacctgaaccagtgccggaaggccttaaatggaaagaccctcatggtgtttacaccgatcagggaaaaagtctccagtccaaaatcaaactgatgtccaatgatagatacactttcgcggaccgggattggtatagcccgttgttcagctatttgcacgcggaaggaaactccagacaaggaaaactatggttggttggatttgccagcgataaagcaaaaagcatagacatctgggacaagatcatcgagcttgagggaactgatacaaatgatgagctactggctcaattggcaaacagggctactgcccttaatgccatgcgcaagaagcctctcagaggtgatttcaaaaagtcagtgggcactccccagattgctgacattatcccccacgccgaaagcagaattgccatcaatgcgggtaaaatgactgagaacaggggctattcctggcaggatgccgatactgaatacggagaactgctcaccaaggttgcatgctctttggagccggctcaaacagtggacgccaggctcaagagaggtaaattcatttcccgcaagccctggccagttataccagaatccaaaacaaaacccgcagaggaggaccagaatgaatagaggaaccgttgacttcattgcaagcctggagaacctcaaagaaggcgatttgggcattcttagaaaactcaggggagcccggcttgatgaaaagcttcccggatttgacctgttttccgccctatggtggcctttgcggcaaaagaatcaacgcgctcccaagcgtgaagtggcttggttgatcgccaaactttttgctgaattccgctttgaacagcgcgagggagccacattgcccattcttatgggaggcatctgccggaagttggaacccaaaaaggaattaccccgggtattggcacgctttgatcaactcgcatcgcttgacattatgcagatggaagagccgctgtcggtcatcatgggtattttgcgcaagcaccagcaggtctgcctggactgggtagggcttactgatgttctgtcattttgggagcaggaacctgtcaaaagagaatggtcggattcatttattaaagcatacaagatcaacaaggaggattcagatgttgattgaaattcatatgattcagaatcacagcccggcaaatcttaaccgggacgacttgggcgcccccaagacctgttatttcggtggagtattacgttctcgcatctccagccaatgcatcaagcgcagcatccgttttgccccggaattcgcggaccttagaggaggtatccgaacaaggcgtctggcagagaaacttgaagaaatgctggaaaacaaagataagaagctggttgccaagtttcttgaagcctgcggaatcaaaaccaaatcttccaagaaagctgcaaaaaagtccgaaaagatacccgcggaagccgatgaagatcaggatgagcagcaggcggctgatacatctgacatgctggtttttaccacttatgatgccctgcgccaaatggcaaagctgctttccgactccaaactaagtgaaagcgaaaaactgctgcagttcaaagatctgctcacaaactgcgtccattctccggatatagcactttgcggcaggatgctggagaccaaagagcttaaaaacactggcgttgaaggcgccctacaggttgcacatgcgatctccacccacattgccagacctgagatagactattttgtggcggccgatgatgttcccggtgaagacgccggagcgggtcatattggcgaatccatgtttgcctcagcctgtttctacaaatacttctccattgattgggaacagttggtcaagaacctgaaaggggacacgaatctggcagcccacaccgtgggtgcctttctcctcgccgcagccaaaaccaaccccagtggcaaacagaacagcttcgccgctcataactatcccgatggcatccttgttgagttcaagaattcccctattagctacgccaacgcattcgtcaggccagtttccgtggtcaaggaatcggacctggtggaacaaagcatcggccagctttccaactacgtgaacgacatcaggcttggctattatgatgagcaatccccagttatcagcttctggttttctccaaacaatcgctattcccttggcaatgagcattccaaactggcttccagaaacattggcaacctcaatgagcttgtaggcgctgtgttggattatattggcggcttcaagtgggaagaagttcagaaaagcaaggcttatgttggcggctgacatgagtgcgccacccaacaccttattcttgcgcttggagggggctttgcagtcttggggcagcaacgaggctaagtttgctttgcgcaggactaccgacgctcccacaaaatcaggtgtcctggggctgctttgcgcggccatgggaattgggcgcgcggaggctgctgattcatggctcccaaaactcgccaacctgcgcatgggcgtgcggatagaccgccccggcatacgctggtgggacttccatactgttggagcgggacaaagaatgcgcatggcagagctgaaggcacccaaaaaaccttccatggttggagctgccctggctgataccctgacaccaagcaaagtaaaaaccagggcagagaccttgctctcacgccgcgaatatcttgccgacgccagttttctggtcgccttgcagggtgagccggaacttgtggaaaagctctccgccgctctggccaagccggtctgggcaatttatctggggcgcaaatcctgtcccccttcacgtcccgtgggcgagcatgctccgggcttttataacactttggaggaggcgctgtccgcggttcccctgcaaaagcgctggcacaatgaacccctgccgcaaatactgccttgcgtcatggactggatccccagccaggacggagaacatgcgcctgatgacgcggagattcattacgatctgccggtttcttttcagccgccccgccatttgccgcgcttcgtgatcaggcgtgagctggttgtgggagaggatgtgcaagtgagcagggaaaccggaaccagcgtttggaggcccaaaggaacccgggcggattataacaattccgagtataagaaggtcagggcggagcggcttgtgatggaccatgccgcgtgcatggtatgcaaagctcccgccacgactgttcaacacgtgaattaccgcagggcgggaggcaaggaaataccggaagacctgcgggcgctgtgccgcctctgccacgacgcctgcaccatgctggaatacggttccggcatgaccaccgaccgcatcgacccctgcgaccccatctggcgggagcgaatactggcaaagcgcaaagatatagtcgagttccgttcgcgcgggcagcgtttccgcaaaatgaagccagaggaggaaaacggatgatctacttgtccaagctattgatcgatactggaggcaatccagaccgtccccgccccggcagaaagtggctggacaatatctataacgtccaccgccgcctttccatggcgttcccttcaggtttgcgccgggagcaggatccgcatttcctgaagcccttttcgccaaacgacttccaaaaaactcccttccttttccgggtcgataacaacatcgacggaaacgataaaagggcgattattatcgtccagtccgttcttgagccggattgggattattgcttccaaaacgcgcttgatttcctggcagcgccaccggaaacaaaggagtataatccagagtttcaagcgggacaactgctccggttcaggctgcgggtaaacgccagcgtacgccgtcatattcctgagaaggtgcaacaggacggtcaaaccatagaaactggcaacatcctgcacaaaagggtttctctcacctgggatccctcttccaccccggatcaggcccttgccgactggctggctgccaaaagcccaaagctgggcttcacccttcagcgctgtgagcttcttcaactgggttgggtttatggctccaagcctgaacctaaaaatgtcaaagcaaaggaacagggacagggctactggcgtgaacacacatacaatcctctgcgcttccgttcggctctactggagggaattctcaaagtggatgacccgaaactgttcctggaaacgcttagaagcggcattggaaaagcgaaaagcttcggctttggcctgctgtccgttctgccaatcaggaatgatgaataaagacctgcactctatcccccggatcagagatcggcttagctatctctatgtggagcatgccaaaattgatcagaacgggcaagccatcgccattcacgatgccctgggagaaaccccggttccttgtgccggcttggctatgctgatgctgggaccgggcataaccatcacccatgcggcaatactttcactggctgcctgtggctgtctggtagcctgggtgggggaacatggcgtcaggttctatgccgcaggcacaggtacaacccgtagcgccgtcaatcttatgaaacaggcaaagtactgggcagacccggttttgcatttacgggttgtgcgctccatgtatcagttgaggttccaggatgagctttctcctgatttaactttgaaccagatcaggggcaaggaaggtgcccgggtgcgcgatacctatttccaactctcccaaaagtatggtgtgcccatgcagggcagaaactatcaaagagacaactggaataaagcggatcccataaaccgggcattatctgtggcaaactcctgcctctacggcatatcgcacgctgccattgttgctgcaggattctctcccggattgggctttgtccacactggcaagcaactgtcatttgtctatgatatcgcggatctatacaaaatggaaatggctgctcccgccgcattccgggcgaccgctgaagggatcggcgaactcgaccgcagagtcaggcttgcctgccgtgatgaattccacaggcagaatctactcaaacgcattgtcgcggatattagttctctcttcggtgatattatgccagaggatagcctggatgactgttttgccgaagaaccagcattgcctggaggactctggtctccagatggagaagtttccccaggcggcatatcttacgggcaggatgatctgccaaaggaagattgatggtggttttagtattggaaaatgtgccaagctccctgaggggtaagatcacacgttggctgctggaagtaaaagccggggtgtttgtgggtaaagtctcagcaatggttagagataaactgtgggataaggttagaagcaattgcagcggtggaacttgcctgatgatctggagtagtcagaccgagcaagggtttgatatcgaattctggggtgccgcatcaagagtcgttacggaatgggagggtatcaaacttatgaccaagcatccttaaactaaggcttgaaggagttcaatgacctcttagacctctattgatcaagtgtattccccatgcatgtgggggtgaaccggatacacacgcatcggttgcataggctgtccggtattccccatgcatgtgggggtgaaccggatcacgtcaccaagatctggcttcggcacaggtattccccatgcatgtgggggtgaaccgcttatccgaatgctacaagctgcacgtgacctgtattccccatgcatgtgggggtgaaccgagacccttcaacctatcgcaaaagaattcaatgtattccccatgcatgtgggggtgaaccgactacaaaacgaggtgatcatatgagtgtcaagtattccccatgcatgtgggggtgaaccgcatctgttttgccttctgcattgccttgtatcgtattccccatgcatgtgggggtgaaccgaacgcccgccagccggcggcactgctggctatgtattccccatgcatgtgggggtgaaccgacgaatcccgtctatgccgcccaggccaacgcgtattccccatgcatgtgggggtgaaccgaaaccaggaattaacgtagtgccaggcaagacgtattccccatgcatgtgggggtgaaccgactttgacaaagccatccaggtaggtgatgccgtattccccatgcatgtgggggtgaaccgccgacgaaatagcgatgaagggactggtaacgtattccccatgcatgtgggggtgaaccggcggcggcggctttgtcggtatcctggtagaggtattccccatgcatgtgggggtgaaccgaggacgtagcgaggcggcttggtgacctgatgg

SEQ ID NO: 1064 - DNA, 103785 bp, Artificial Sequence
  Synthetic Oligonucleotide
  misc_feature (1)..(94229): n is a, c, g, or t
nnnnnnnnnnnnnnnnnnnnnnnnnnnnnnnnnnnnnnnnnnnnnnnnnnnnnnnnnnnnnnnnnnnnnnnnnnnnnnnnnnnnnnnnnnnnnnnnnnnnnnnnnnnnnnnnnnnnnnnnnnnnnnnnnnnnnnnnnnnnnnnnnnnnnnnnnnnnnnnnnnnnnnnnnnnnnnnnnnnnnnnnnnnnnnnnnnnnnnnnnnnnnnnnnnnnnnnnnnnnnnnnnnnnnnnnnnnnnnnnnnnnnnnnnnnnnnnnnnnnnnnnnnnnnnnnnnnnnnnnnnnnnnnnnnnnnnnnnnnnnnnnnnnnnnnnnnnnnnnnnnnnnnnnnnnnnnnnnnnnnnnnnnnnnnnnnnnnnnnnnnnnnnnnnnnnnnnnnnnnnnnnnnnnnnnnnnnnnnnnnnnnnnnnnnnnnnnnnnnnnnnnnnnnnnnnnnnnnnnnnnnnnnnnnnnnnnnnnnnnnnnnnnnnnnnnnnnnnnnnnnnnnnnnnnnnnnnnnnnnnnnnnnnnnnnnnnnnnnnnnnnnnnnnnnnnnnnnnnnnnnnnnnnnnnnnnnnnnnnnnnnnnnnnnnnnnnnnnnnnnnnnnnnnnnnnnnnnnnnnnnnnnnnnnnnnnnnnnnnnnnnnnnnnnnnnnnnnnnnnnnnnnnnnnnnnnnnnnnnnnnnnnnnnnnnnnnnnnnnnnnnnnnnnnnnnnnnnnnnnnnnnnnnnnnnnnnnnnnnnnnnnnnnnnnnnnnnnnnnnnnnnnnnnnnnnnnnnnnnnnnnnnnnnnnnnnnnnnnnnnnnnnnnnnnnnnnnnnnnnnnnnnnnnnnnnnnnnnnnnnnnnnnnnnnnnnnnnnnnnnnnnnnnnnnnnnnnnnnnnnnnnnnnnnnnnnnnnnnnnnnnnnnnnnnnnnnnnnnnnnnnnnnnnnnnnnnnnnnnnnnnnnnnnnnnnnnnnnnnnnnnnnnnnnnnnnnnnnnnnnnnnnnnnnnnnnnnnnnnnnnnnnnnnnnnnnnnnnnnnnnnnnnnnnnnnnnnnnnnnnnnnnnnnnnnnnnnnnnnnnnnnnnnnnnnnnnnnnnnnnnnnnnnnnnnnnnnnnnnnnnnnnnnnnnnnnnnnnnnnnnnnnnnnnnnnnnnnnnnnnnnnnnnnnnnnnnnnnnnnnnnnnnnnnnnnnnnnnnnnnnnnnnnnnnnnnnnnnnnnnnnnnnnnnnnnnnnnnnnnnnnnnnnnnnnnnnnnnnnnnnnnnnnnnnnnnnnnnnnnnnnnnnnnnnnnnnnnnnnnnnnnnnnnnnnnnnnnnnnnnnnnnnnnnnnnnnnnnnnnnnnnnnnnnnnnnnnnnnnnnnnnnnnnnnnnnnnnnnnnnnnnnnnnnnnnnnnnnnnnnnnnnnnnnnnnnnnnnnnnnnnnnnnnnnnnnnnnnnnnnnnnnnnnnnnnnnnnnnnnnnnnnnnnnnnnnnnnnnnnnnnnnnnnnnnnnnnnnnnnnnnnnnnnnnnnnnnnnnnnnnnnnnnnnnnnnnnnnnnnnnnnnnnnnnnnnnnnnnnnnnnnnnnnnnnnnnnnnnnnnnnnnnnnnnnnnnnnnnnnnnnnnnnnnnnnnnnnnnnnnnnnnnnnnnnnnnnnnnnnnnnnnnnnnnnnnnnnnnnnnnnnnnnnnnnnnnnnnnnnnnnnnnnnnnnnnnnnnnnnnnnnnnnnnnnnnnnnnnnnnnnnnnnnnnnnnnnnnnnnnnnnnnnnnnnnnnnnnnnnnnnnnnnnnnnnnnnnnnnnnnnnnnnnnnnnnnnnnnnnnnnnnnnnnnnnnnnnnnnnnnnnnnnnnnnnnnnnnnnnnnnnnnnnnnnnnnnnnnnnnnnnnnnnnnnnnnnnnnnnnnnnnnnnnnnnnnnnnnnnnnnnnnnnnnnnnnnnnnnnnnnnnnnnnnnnnnnnnnnnnnnnnnnnnnnnnnnnnnnnnnnnnnnnnnnnnnnnnnnnnnnnnnnnnnnnnnnnnnnnnnnnnnnnnnnnnnnnnnnnnnnnnnnnnnnnnnnnnnnnnnnnnnnnnnnnnnnnnnnnnnnnnnnnnnnnnnnnnnnnnnnnnnnnnnnnnnnnnnnnnnnnnnnnnnnnnnnnnnnnnnnnnnnnnnnnnnnnnnnnnnnnnnnnnnnnnnnnnnnnnnnnnnnnnnnnnnnnnnnnnnnnnnnnnnnnnnnnnnnnnnnnnnnnnnnnnnnnnnnnnnnnnnnnnnnnnnnnnnnnnnnnnnnnnnnnnnnnnnnnnnnnnnnnnnnnnnnnnnnnnnnnnnnnnnnnnnnnnnnnnnnnnnnnnnnnnnnnnnnnnnnnnnnnnnnnnnnnnnnnnnnnnnnnnnnnnnnnnnnnnnnnnnnnnnnnnnnnnnnnnnnnnnnnnnnnnnnnnnnnnnnnnnnnnnnnnnnnnnnnnnnnnnnnnnnnnnnnnnnnnnnnnnnnnnnnnnnnnnnnnnnnnnnnnnnnnnnnnnnnnnnnnnnnnnnnnnnnnnnnnnnnnnnnnnnnnnnnnnnnnnnnnnnnnnnnnnnnnnnnnnnnnnnnnnnnnnnnnnnnnnnnnnnnnnnnnnnnnnnnnnnnnnnnnnnnnnnnnnnnnnnnnnnnnnnnnnnnnnnnnnnnnnnnnnnnnnnnnnnnnnnnnnnnnnnnnnnnnnnnnnnnnnnnnnnnnnnnnnnnnnnnnnnnnnnnnnnnnnnnnnnnnnnnnnnnnnnnnnnnnnnnnnnnnnnnnnnnnnnnnnnnnnnnnnnnnnnnnnnnnnnnnnnnnnnnnnnnnnnnnnnnnnnnnnnnnnnnnnnnnnnnnnnnnnnnnnnnnnnnnnnnnnnnnnnnnnnnnnnnnnnnnnnnnnnnnnnnnnnnnnnnnnnnnnnnnnnnnnnnnnnnnnnnnnnnnnnnnnnnnnnnnnnnnnnnnnnnnnnnnnnnnnnnnnnnnnnnnnnnnnnnnnnnnnnnnnnnnnnnnnnnnnnnnnnnnnnnnnnnnnnnnnnnnnnnnnnnnnnnnnnnnnnnnnnnnnnnnnnnnnnnnnnnnnnnnnnnnnnnnnnnnnnnnnnnnnnnnnnnnnnnnnnnnnnnnnnnnnnnnnnnnnnnnnnnnnnnnnnnnnnnnnnnnnnnnnnnnnnnnnnnnnnnnnnnnnnnnnnnnnnnnnnnnnnnnnnnnnnnnnnnnnnnnnnnnnnnnnnnnnnnnnnnnnnnnnnnnnnnnnnnnnnnnnnnnnnnnnnnnnnnnnnnnnnnnnnnnnnnnnnnnnnnnnnnnnnnnnnnnnnnnnnnnnnnnnnnnnnnnnnnnnnnnnnnnnnnnnnnnnnnnnnnnnnnnnnnnnnnnnnnnnnnnnnnnnnnnnnnnnnnnnnnnnnnnnnnnnnnnnnnnnnnnnnnnnnnnnnnnnnnnnnnnnnnnnnnnnnnnnnnnnnnnnnnnnnnnnnnnnnnnnnnnnnnnnnnnnnnnnnnnnnnnnnnnnnnnnnnnnnnnnnnnnnnnnnnnnnnnnnnnnnnnnnnnnnnnnnnnnnnnnnnnnnnnnnnnnnnnnnnnnnnnnnnnnnnnnnnnnnnnnnnnnnnnnnnnnnnnnnnnnnnnnnnnnnnnnnnnnnnnnnnnnnnnnnnnnnnnnnnnnnnnnnnnnnnnnnnnnnnnnnnnnnnnnnnnnnnnnnnnnnnnnnnnnnnnnnnnnnnnnnnnnnnnnnnnnnnnnnnnnnnnnnnnnnnnnnnnnnnnnnnnnnnnnnnnnnnnnnnnnnnnnnnnnnnnnnnnnnnnnnnnnnnnnnnnnnnnnnnnnnnnnnnnnnnnnnnnnnnnnnnnnnnnnnnnnnnnnnnnnnnnnnnnnnnnnnnnnnnnnnnnnnnnnnnnnnnnnnnnnnnnnnnnnnnnnnnnnnnnnnnnnnnnnnnnnnnnnnnnnnnnnnnnnnnnnnnnnnnnnnnnnnnnnnnnnnnnnnnnnnnnnnnnnnnnnnnnnnnnnnnnnnnnnnnnnnnnnnnnnnnnnnnnnnnnnnnnnnnnnnnnnnnnnnnnnnnnnnnnnnnnnnnnnnnnnnnnnnnnnnnnnnnnnnnnnnnnnnnnnnnnnnnnnnnnnnnnnnnnnnnnnnnnnnnnnnnnnnnnnnnnnnnnnnnnnnnnnnnnnnnnnnnnnnnnnnnnnnnnnnnnnnnnnnnnnnnnnnnnnnnnnnnnnnnnnnnnnnnnnnnnnnnnnnnnnnnnnnnnnnnnnnnnnnnnnnnnnnnnnnnnnnnnnnnnnnnnnnnnnnnnnnnnnnnnnnnnnnnnnnnnnnnnnnnnnnnnnnnnnnnnnnnnnnnnnnnnnnnnnnnnnnnnnnnnnnnnnnnnnnnnnnnnnnnnnnnnnnnnnnnnnnnnnnnnnnnnnnnnnnnnnnnnnnnnnnnnnnnnnnnnnnnnnnnnnnnnnnnnnnnnnnnnnnnnnnnnnnnnnnnnnnnnnnnnnnnnnnnnnnnnnnnnnnnnnnnnnnnnnnnnnnnnnnnnnnnnnnnnnnnnnnnnnnnnnnnnnnnnnnnnnnnnnnnnnnnnnnnnnnnnnnnnnnnnnnnnnnnnnnnnnnnnnnnnnnnnnnnnnnnnnnnnnnnnnnnnnnnnnnnnnnnnnnnnnnnnnnnnnnnnnnnnnnnnnnnnnnnnnnnnnnnnnnnnnnnnnnnnnnnnnnnnnnnnnnnnnnnnnnnnnnnnnnnnnnnnnnnnnnnnnnnnnnnnnnnnnnnnnnnnnnnnnnnnnnnnnnnnnnnnnnnnnnnnnnnnnnnnnnnnnnnnnnnnnnnnnnnnnnnnnnnnnnnnnnnnnnnnnnnnnnnnnnnnnnnnnnnnnnnnnnnnnnnnnnnnnnnnnnnnnnnnnnnnnnnnnnnnnnnnnnnnnnnnnnnnnnnnnnnnnnnnnnnnnnnnnnnnnnnnnnnnnnnnnnnnnnnnnnnnnnnnnnnnnnnnnnnnnnnnnnnnnnnnnnnnnnnnnnnnnnnnnnnnnnnnnnnnnnnnnnnnnnnnnnnnnnnnnnnnnnnnnnnnnnnnnnnnnnnnnnnnnnnnnnnnnnnnnnnnnnnnnnnnnnnnnnnnnnnnnnnnnnnnnnnnnnnnnnnnnnnnnnnnnnnnnnnnnnnnnnnnnnnnnnnnnnnnnnnnnnnnnnnnnnnnnnnnnnnnnnnnnnnnnnnnnnnnnnnnnnnnnnnnnnnnnnnnnnnnnnnnnnnnnnnnnnnnnnnnnnnnnnnnnnnnnnnnnnnnnnnnnnnnnnnnnnnnnnnnnnnnnnnnnnnnnnnnnnnnnnnnnnnnnnnnnnnnnnnnnnnnnnnnnnnnnnnnnnnnnnnnnnnnnnnnnnnnnnnnnnnnnnnnnnnnnnnnnnnnnnnnnnnnnnnnnnnnnnnnnnnnnnnnnnnnnnnnnnnnnnnnnnnnnnnnnnnnnnnnnnnnnnnnnnnnnnnnnnnnnnnnnnnnnnnnnnnnnnnnnnnnnnnnnnnnnnnnnnnnnnnnnnnnnnnnnnnnnnnnnnnnnnnnnnnnnnnnnnnnnnnnnnnnnnnnnnnnnnnnnnnnnnnnnnnnnnnnnnnnnnnnnnnnnnnnnnnnnnnnnnnnnnnnnnnnnnnnnnnnnnnnnnnnnnnnnnnnnnnnnnnnnnnnnnnnnnnnnnnnnnnnnnnnnnnnnnnnnnnnnnnnnnnnnnnnnnnnnnnnnnnnnnnnnnnnnnnnnnnnnnnnnnnnnnnnnnnnnnnnnnnnnnnnnnnnnnnnnnnnnnnnnnnnnnnnnnnnnnnnnnnnnnnnnnnnnnnnnnnnnnnnnnnnnnnnnnnnnnnnnnnnnnnnnnnnnnnnnnnnnnnnnnnnnnnnnnnnnnnnnnnnnnnnnnnnnnnnnnnnnnnnnnnnnnnnnnnnnnnnnnnnnnnnnnnnnnnnnnnnnnnnnnnnnnnnnnnnnnnnnnnnnnnnnnnnnnnnnnnnnnnnnnnnnnnnnnnnnnnnnnnnnnnnnnnnnnnnnnnnnnnnnnnnnnnnnnnnnnnnnnnnnnnnnnnnnnnnnnnnnnnnnnnnnnnnnnnnnnnnnnnnnnnnnnnnnnnnnnnnnnnnnnnnnnnnnnnnnnnnnnnnnnnnnnnnnnnnnnnnnnnnnnnnnnnnnnnnnnnnnnnnnnnnnnnnnnnnnnnnnnnnnnnnnnnnnnnnnnnnnnnnnnnnnnnnnnnnnnnnnnnnnnnnnnnnnnnnnnnnnnnnnnnnnnnnnnnnnnnnnnnnnnnnnnnnnnnnnnnnnnnnnnnnnnnnnnnnnnnnnnnnnnnnnnnnnnnnnnnnnnnnnnnnnnnnnnnnnnnnnnnnnnnnnnnnnnnnnnnnnnnnnnnnnnnnnnnnnnnnnnnnnnnnnnnnnnnnnnnnnnnnnnnnnnnnnnnnnnnnnnnnnnnnnnnnnnnnnnnnnnnnnnnnnnnnnnnnnnnnnnnnnnnnnnnnnnnnnnnnnnnnnnnnnnnnnnnnnnnnnnnnnnnnnnnnnnnnnnnnnnnnnnnnnnnnnnnnnnnnnnnnnnnnnnnnnnnnnnnnnnnnnnnnnnnnnnnnnnnnnnnnnnnnnnnnnnnnnnnnnnnnnnnnnnnnnnnnnnnnnnnnnnnnnnnnnnnnnnnnnnnnnnnnnnnnnnnnnnnnnnnnnnnnnnnnnnnnnnnnnnnnnnnnnnnnnnnnnnnnnnnnnnnnnnnnnnnnnnnnnnnnnnnnnnnnnnnnnnnnnnnnnnnnnnnnnnnnnnnnnnnnnnnnnnnnnnnnnnnnnnnnnnnnnnnnnnnnnnnnnnnnnnnnnnnnnnnnnnnnnnnnnnnnnnnnnnnnnnnnnnnnnnnnnnnnnnnnnnnnnnnnnnnnnnnnnnnnnnnnnnnnnnnnnnnnnnnnnnnnnnnnnnnnnnnnnnnnnnnnnnnnnnnnnnnnnnnnnnnnnnnnnnnnnnnnnnnnnnnnnnnnnnnnnnnnnnnnnnnnnnnnnnnnnnnnnnnnnnnnnnnnnnnnnnnnnnnnnnnnnnnnnnnnnnnnnnnnnnnnnnnnnnnnnnnnnnnnnnnnnnnnnnnnnnnnnnnnnnnnnnnnnnnnnnnnnnnnnnnnnnnnnnnnnnnnnnnnnnnnnnnnnnnnnnnnnnnnnnnnnnnnnnnnnnnnnnnnnnnnnnnnnnnnnnnnnnnnnnnnnnnnnnnnnnnnnnnnnnnnnnnnnnnnnnnnnnnnnnnnnnnnnnnnnnnnnnnnnnnnnnnnnnnnnnnnnnnnnnnnnnnnnnnnnnnnnnnnnnnnnnnnnnnnnnnnnnnnnnnnnnnnnnnnnnnnnnnnnnnnnnnnnnnnnnnnnnnnnnnnnnnnnnnnnnnnnnnnnnnnnnnnnnnnnnnnnnnnnnnnnnnnnnnnnnnnnnnnnnnnnnnnnnnnnnnnnnnnnnnnnnnnnnnnnnnnnnnnnnnnnnnnnnnnnnnnnnnnnnnnnnnnnnnnnnnnnnnnnnnnnnnnnnnnnnnnnnnnnnnnnnnnnnnnnnnnnnnnnnnnnnnnnnnnnnnnnnnnnnnnnnnnnnnnnnnnnnnnnnnnnnnnnnnnnnnnnnnnnnnnnnnnnnnnnnnnnnnnnnnnnnnnnnnnnnnnnnnnnnnnnnnnnnnnnnnnnnnnnnnnnnnnnnnnnnnnnnnnnnnnnnnnnnnnnnnnnnnnnnnnnnnnnnnnnnnnnnnnnnnnnnnnnnnnnnnnnnnnnnnnnnnnnnnnnnnnnnnnnnnnnnnnnnnnnnnnnnnnnnnnnnnnnnnnnnnnnnnnnnnnnnnnnnnnnnnnnnnnnnnnnnnnnnnnnnnnnnnnnnnnnnnnnnnnnnnnnnnnnnnnnnnnnnnnnnnnnnnnnnnnnnnnnnnnnnnnnnnnnnnnnnnnnnnnnnnnnnnnnnnnnnnnnnnnnnnnnnnnnnnnnnnnnnnnnnnnnnnnnnnnnnnnnnnnnnnnnnnnnnnnnnnnnnnnnnnnnnnnnnnnnnnnnnnnnnnnnnnnnnnnnnnnnnnnnnnnnnnnnnnnnnnnnnnnnnnnnnnnnnnnnnnnnnnnnnnnnnnnnnnnnnnnnnnnnnnnnnnnnnnnnnnnnnnnnnnnnnnnnnnnnnnnnnnnnnnnnnnnnnnnnnnnnnnnnnnnnnnnnnnnnnnnnnnnnnnnnnnnnnnnnnnnnnnnnnnnnnnnnnnnnnnnnnnnnnnnnnnnnnnnnnnnnnnnnnnnnnnnnnnnnnnnnnnnnnnnnnnnnnnnnnnnnnnnnnnnnnnnnnnnnnnnnnnnnnnnnnnnnnnnnnnnnnnnnnnnnnnnnnnnnnnnnnnnnnnnnnnnnnnnnnnnnnnnnnnnnnnnnnnnnnnnnnnnnnnnnnnnnnnnnnnnnnnnnnnnnnnnnnnnnnnnnnnnnnnnnnnnnnnnnnnnnnnnnnnnnnnnnnnnnnnnnnnnnnnnnnnnnnnnnnnnnnnnnnnnnnnnnnnnnnnnnnnnnnnnnnnnnnnnnnnnnnnnnnnnnnnnnnnnnnnnnnnnnnnnnnnnnnnnnnnnnnnnnnnnnnnnnnnnnnnnnnnnnnnnnnnnnnnnnnnnnnnnnnnnnnnnnnnnnnnnnnnnnnnnnnnnnnnnnnnnnnnnnnnnnnnnnnnnnnnnnnnnnnnnnnnnnnnnnnnnnnnnnnnnnnnnnnnnnnnnnnnnnnnnnnnnnnnnnnnnnnnnnnnnnnnnnnnnnnnnnnnnnnnnnnnnnnnnnnnnnnnnnnnnnnnnnnnnnnnnnnnnnnnnnnnnnnnnnnnnnnnnnnnnnnnnnnnnnnnnnnnnnnnnnnnnnnnnnnnnnnnnnnnnnnnnnnnnnnnnnnnnnnnnnnnnnnnnnnnnnnnnnnnnnnnnnnnnnnnnnnnnnnnnnnnnnnnnnnnnnnnnnnnnnnnnnnnnnnnnnnnnnnnnnnnnnnnnnnnnnnnnnnnnnnnnnnnnnnnnnnnnnnnnnnnnnnnnnnnnnnnnnnnnnnnnnnnnnnnnnnnnnnnnnnnnnnnnnnnnnnnnnnnnnnnnnnnnnnnnnnnnnnnnnnnnnnnnnnnnnnnnnnnnnnnnnnnnnnnnnnnnnnnnnnnnnnnnnnnnnnnnnnnnnnnnnnnnnnnnnnnnnnnnnnnnnnnnnnnnnnnnnnnnnnnnnnnnnnnnnnnnnnnnnnnnnnnnnnnnnnnnnnnnnnnnnnnnnnnnnnnnnnnnnnnnnnnnnnnnnnnnnnnnnnnnnnnnnnnnnnnnnnnnnnnnnnnnnnnnnnnnnnnnnnnnnnnnnnnnnnnnnnnnnnnnnnnnnnnnnnnnnnnnnnnnnnnnnnnnnnnnnnnnnnnnnnnnnnnnnnnnnnnnnnnnnnnnnnnnnnnnnnnnnnnnnnnnnnnnnnnnnnnnnnnnnnnnnnnnnnnnnnnnnnnnnnnnnnnnnnnnnnnnnnnnnnnnnnnnnnnnnnnnnnnnnnnnnnnnnnnnnnnnnnnnnnnnnnnnnnnnnnnnnnnnnnnnnnnnnnnnnnnnnnnnnnnnnnnnnnnnnnnnnnnnnnnnnnnnnnnnnnnnnnnnnnnnnnnnnnnnnnnnnnnnnnnnnnnnnnnnnnnnnnnnnnnnnnnnnnnnnnnnnnnnnnnnnnnnnnnnnnnnnnnnnnnnnnnnnnnnnnnnnnnnnnnnnnnnnnnnnnnnnnnnnnnnnnnnnnnnnnnnnnnnnnnnnnnnnnnnnnnnnnnnnnnnnnnnnnnnnnnnnnnnnnnnnnnnnnnnnnnnnnnnnnnnnnnnnnnnnnnnnnnnnnnnnnnnnnnnnnnnnnnnnnnnnnnnnnnnnnnnnnnnnnnnnnnnnnnnnnnnnnnnnnnnnnnnnnnnnnnnnnnnnnnnnnnnnnnnnnnnnnnnnnnnnnnnnnnnnnnnnnnnnnnnnnnnnnnnnnnnnnnnnnnnnnnnnnnnnnnnnnnnnnnnnnnnnnnnnnnnnnnnnnnnnnnnnnnnnnnnnnnnnnnnnnnnnnnnnnnnnnnnnnnnnnnnnnnnnnnnnnnnnnnnnnnnnnnnnnnnnnnnnnnnnnnnnnnnnnnnnnnnnnnnnnnnnnnnnnnnnnnnnnnnnnnnnnnnnnnnnnnnnnnnnnnnnnnnnnnnnnnnnnnnnnnnnnnnnnnnnnnnnnnnnnnnnnnnnnnnnnnnnnnnnnnnnnnnnnnnnnnnnnnnnnnnnnnnnnnnnnnnnnnnnnnnnnnnnnnnnnnnnnnnnnnnnnnnnnnnnnnnnnnnnnnnnnnnnnnnnnnnnnnnnnnnnnnnnnnnnnnnnnnnnnnnnnnnnnnnnnnnnnnnnnnnnnnnnnnnnnnnnnnnnnnnnnnnnnnnnnnnnnnnnnnnnnnnnnnnnnnnnnnnnnnnnnnnnnnnnnnnnnnnnnnnnnnnnnnnnnnnnnnnnnnnnnnnnnnnnnnnnnnnnnnnnnnnnnnnnnnnnnnnnnnnnnnnnnnnnnnnnnnnnnnnnnnnnnnnnnnnnnnnnnnnnnnnnnnnnnnnnnnnnnnnnnnnnnnnnnnnnnnnnnnnnnnnnnnnnnnnnnnnnnnnnnnnnnnnnnnnnnnnnnnnnnnnnnnnnnnnnnnnnnnnnnnnnnnnnnnnnnnnnnnnnnnnnnnnnnnnnnnnnnnnnnnnnnnnnnnnnnnnnnnnnnnnnnnnnnnnnnnnnnnnnnnnnnnnnnnnnnnnnnnnnnnnnnnnnnnnnnnnnnnnnnnnnnnnnnnnnnnnnnnnnnnnnnnnnnnnnnnnnnnnnnnnnnnnnnnnnnnnnnnnnnnnnnnnnnnnnnnnnnnnnnnnnnnnnnnnnnnnnnnnnnnnnnnnnnnnnnnnnnnnnnnnnnnnnnnnnnnnnnnnnnnnnnnnnnnnnnnnnnnnnnnnnnnnnnnnnnnnnnnnnnnnnnnnnnnnnnnnnnnnnnnnnnnnnnnnnnnnnnnnnnnnnnnnnnnnnnnnnnnnnnnnnnnnnnnnnnnnnnnnnnnnnnnnnnnnnnnnnnnnnnnnnnnnnnnnnnnnnnnnnnnnnnnnnnnnnnnnnnnnnnnnnnnnnnnnnnnnnnnnnnnnnnnnnnnnnnnnnnnnnnnnnnnnnnnnnnnnnnnnnnnnnnnnnnnnnnnnnnnnnnnnnnnnnnnnnnnnnnnnnnnnnnnnnnnnnnnnnnnnnnnnnnnnnnnnnnnnnnnnnnnnnnnnnnnnnnnnnnnnnnnnnnnnnnnnnnnnnnnnnnnnnnnnnnnnnnnnnnnnnnnnnnnnnnnnnnnnnnnnnnnnnnnnnnnnnnnnnnnnnnnnnnnnnnnnnnnnnnnnnnnnnnnnnnnnnnnnnnnnnnnnnnnnnnnnnnnnnnnnnnnnnnnnnnnnnnnnnnnnnnnnnnnnnnnnnnnnnnnnnnnnnnnnnnnnnnnnnnnnnnnnnnnnnnnnnnnnnnnnnnnnnnnnnnnnnnnnnnnnnnnnnnnnnnnnnnnnnnnnnnnnnnnnnnnnnnnnnnnnnnnnnnnnnnnnnnnnnnnnnnnnnnnnnnnnnnnnnnnnnnnnnnnnnnnnnnnnnnnnnnnnnnnnnnnnnnnnnnnnnnnnnnnnnnnnnnnnnnnnnnnnnnnnnnnnnnnnnnnnnnnnnnnnnnnnnnnnnnnnnnnnnnnnnnnnnnnnnnnnnnnnnnnnnnnnnnnnnnnnnnnnnnnnnnnnnnnnnnnnnnnnnnnnnnnnnnnnnnnnnnnnnnnnnnnnnnnnnnnnnnnnnnnnnnnnnnnnnnnnnnnnnnnnnnnnnnnnnnnnnnnnnnnnnnnnnnnnnnnnnnnnnnnnnnnnnnnnnnnnnnnnnnnnnnnnnnnnnnnnnnnnnnnnnnnnnnnnnnnnnnnnnnnnnnnnnnnnnnnnnnnnnnnnnnnnnnnnnnnnnnnnnnnnnnnnnnnnnnnnnnnnnnnnnnnnnnnnnnnnnnnnnnnnnnnnnnnnnnnnnnnnnnnnnnnnnnnnnnnnnnnnnnnnnnnnnnnnnnnnnnnnnnnnnnnnnnnnnnnnnnnnnnnnnnnnnnnnnnnnnnnnnnnnnnnnnnnnnnnnnnnnnnnnnnnnnnnnnnnnnnnnnnnnnnnnnnnnnnnnnnnnnnnnnnnnnnnnnnnnnnnnnnnnnnnnnnnnnnnnnnnnnnnnnnnnnnnnnnnnnnnnnnnnnnnnnnnnnnnnnnnnnnnnnnnnnnnnnnnnnnnnnnnnnnnnnnnnnnnnnnnnnnnnnnnnnnnnnnnnnnnnnnnnnnnnnnnnnnnnnnnnnnnnnnnnnnnnnnnnnnnnnnnnnnnnnnnnnnnnnnnnnnnnnnnnnnnnnnnnnnnnnnnnnnnnnnnnnnnnnnnnnnnnnnnnnnnnnnnnnnnnnnnnnnnnnnnnnnnnnnnnnnnnnnnnnnnnnnnnnnnnnnnnnnnnnnnnnnnnnnnnnnnnnnnnnnnnnnnnnnnnnnnnnnnnnnnnnnnnnnnnnnnnnnnnnnnnnnnnnnnnnnnnnnnnnnnnnnnnnnnnnnnnnnnnnnnnnnnnnnnnnnnnnnnnnnnnnnnnnnnnnnnnnnnnnnnnnnnnnnnnnnnnnnnnnnnnnnnnnnnnnnnnnnnnnnnnnnnnnnnnnnnnnnnnnnnnnnnnnnnnnnnnnnnnnnnnnnnnnnnnnnnnnnnnnnnnnnnnnnnnnnnnnnnnnnnnnnnnnnnnnnnnnnnnnnnnnnnnnnnnnnnnnnnnnnnnnnnnnnnnnnnnnnnnnnnnnnnnnnnnnnnnnnnnnnnnnnnnnnnnnnnnnnnnnnnnnnnnnnnnnnnnnnnnnnnnnnnnnnnnnnnnnnnnnnnnnnnnnnnnnnnnnnnnnnnnnnnnnnnnnnnnnnnnnnnnnnnnnnnnnnnnnnnnnnnnnnnnnnnnnnnnnnnnnnnnnnnnnnnnnnnnnnnnnnnnnnnnnnnnnnnnnnnnnnnnnnnnnnnnnnnnnnnnnnnnnnnnnnnnnnnnnnnnnnnnnnnnnnnnnnnnnnnnnnnnnnnnnnnnnnnnnnnnnnnnnnnnnnnnnnnnnnnnnnnnnnnnnnnnnnnnnnnnnnnnnnnnnnnnnnnnnnnnnnnnnnnnnnnnnnnnnnnnnnnnnnnnnnnnnnnnnnnnnnnnnnnnnnnnnnnnnnnnnnnnnnnnnnnnnnnnnnnnnnnnnnnnnnnnnnnnnnnnnnnnnnnnnnnnnnnnnnnnnnnnnnnnnnnnnnnnnnnnnnnnnnnnnnnnnnnnnnnnnnnnnnnnnnnnnnnnnnnnnnnnnnnnnnnnnnnnnnnnnnnnnnnnnnnnnnnnnnnnnnnnnnnnnnnnnnnnnnnnnnnnnnnnnnnnnnnnnnnnnnnnnnnnnnnnnnnnnnnnnnnnnnnnnnnnnnnnnnnnnnnnnnnnnnnnnnnnnnnnnnnnnnnnnnnnnnnnnnnnnnnnnnnnnnnnnnnnnnnnnnnnnnnnnnnnnnnnnnnnnnnnnnnnnnnnnnnnnnnnnnnnnnnnnnnnnnnnnnnnnnnnnnnnnnnnnnnnnnnnnnnnnnnnnnnnnnnnnnnnnnnnnnnnnnnnnnnnnnnnnnnnnnnnnnnnnnnnnnnnnnnnnnnnnnnnnnnnnnnnnnnnnnnnnnnnnnnnnnnnnnnnnnnnnnnnnnnnnnnnnnnnnnnnnnnnnnnnnnnnnnnnnnnnnnnnnnnnnnnnnnnnnnnnnnnnnnnnnnnnnnnnnnnnnnnnnnnnnnnnnnnnnnnnnnnnnnnnnnnnnnnnnnnnnnnnnnnnnnnnnnnnnnnnnnnnnnnnnnnnnnnnnnnnnnnnnnnnnnnnnnnnnnnnnnnnnnnnnnnnnnnnnnnnnnnnnnnnnnnnnnnnnnnnnnnnnnnnnnnnnnnnnnnnnnnnnnnnnnnnnnnnnnnnnnnnnnnnnnnnnnnnnnnnnnnnnnnnnnnnnnnnnnnnnnnnnnnnnnnnnnnnnnnnnnnnnnnnnnnnnnnnnnnnnnnnnnnnnnnnnnnnnnnnnnnnnnnnnnnnnnnnnnnnnnnnnnnnnnnnnnnnnnnnnnnnnnnnnnnnnnnnnnnnnnnnnnnnnnnnnnnnnnnnnnnnnnnnnnnnnnnnnnnnnnnnnnnnnnnnnnnnnnnnnnnnnnnnnnnnnnnnnnnnnnnnnnnnnnnnnnnnnnnnnnnnnnnnnnnnnnnnnnnnnnnnnnnnnnnnnnnnnnnnnnnnnnnnnnnnnnnnnnnnnnnnnnnnnnnnnnnnnnnnnnnnnnnnnnnnnnnnnnnnnnnnnnnnnnnnnnnnnnnnnnnnnnnnnnnnnnnnnnnnnnnnnnnnnnnnnnnnnnnnnnnnnnnnnnnnnnnnnnnnnnnnnnnnnnnnnnnnnnnnnnnnnnnnnnnnnnnnnnnnnnnnnnnnnnnnnnnnnnnnnnnnnnnnnnnnnnnnnnnnnnnnnnnnnnnnnnnnnnnnnnnnnnnnnnnnnnnnnnnnnnnnnnnnnnnnnnnnnnnnnnnnnnnnnnnnnnnnnnnnnnnnnnnnnnnnnnnnnnnnnnnnnnnnnnnnnnnnnnnnnnnnnnnnnnnnnnnnnnnnnnnnnnnnnnnnnnnnnnnnnnnnnnnnnnnnnnnnnnnnnnnnnnnnnnnnnnnnnnnnnnnnnnnnnnnnnnnnnnnnnnnnnnnnnnnnnnnnnnnnnnnnnnnnnnnnnnnnnnnnnnnnnnnnnnnnnnnnnnnnnnnnnnnnnnnnnnnnnnnnnnnnnnnnnnnnnnnnnnnnnnnnnnnnnnnnnnnnnnnnnnnnnnnnnnnnnnnnnnnnnnnnnnnnnnnnnnnnnnnnnnnnnnnnnnnnnnnnnnnnnnnnnnnnnnnnnnnnnnnnnnnnnnnnnnnnnnnnnnnnnnnnnnnnnnnnnnnnnnnnnnnnnnnnnnnnnnnnnnnnnnnnnnnnnnnnnnnnnnnnnnnnnnnnnnnnnnnnnnnnnnnnnnnnnnnnnnnnnnnnnnnnnnnnnnnnnnnnnnnnnnnnnnnnnnnnnnnnnnnnnnnnnnnnnnnnnnnnnnnnnnnnnnnnnnnnnnnnnnnnnnnnnnnnnnnnnnnnnnnnnnnnnnnnnnnnnnnnnnnnnnnnnnnnnnnnnnnnnnnnnnnnnnnnnnnnnnnnnnnnnnnnnnnnnnnnnnnnnnnnnnnnnnnnnnnnnnnnnnnnnnnnnnnnnnnnnnnnnnnnnnnnnnnnnnnnnnnnnnnnnnnnnnnnnnnnnnnnnnnnnnnnnnnnnnnnnnnnnnnnnnnnnnnnnnnnnnnnnnnnnnnnnnnnnnnnnnnnnnnnnnnnnnnnnnnnnnnnnnnnnnnnnnnnnnnnnnnnnnnnnnnnnnnnnnnnnnnnnnnnnnnnnnnnnnnnnnnnnnnnnnnnnnnnnnnnnnnnnnnnnnnnnnnnnnnnnnnnnnnnnnnnnnnnnnnnnnnnnnnnnnnnnnnnnnnnnnnnnnnnnnnnnnnnnnnnnnnnnnnnnnnnnnnnnnnnnnnnnnnnnnnnnnnnnnnnnnnnnnnnnnnnnnnnnnnnnnnnnnnnnnnnnnnnnnnnnnnnnnnnnnnnnnnnnnnnnnnnnnnnnnnnnnnnnnnnnnnnnnnnnnnnnnnnnnnnnnnnnnnnnnnnnnnnnnnnnnnnnnnnnnnnnnnnnnnnnnnnnnnnnnnnnnnnnnnnnnnnnnnnnnnnnnnnnnnnnnnnnnnnnnnnnnnnnnnnnnnnnnnnnnnnnnnnnnnnnnnnnnnnnnnnnnnnnnnnnnnnnnnnnnnnnnnnnnnnnnnnnnnnnnnnnnnnnnnnnnnnnnnnnnnnnnnnnnnnnnnnnnnnnnnnnnnnnnnnnnnnnnnnnnnnnnnnnnnnnnnnnnnnnnnnnnnnnnnnnnnnnnnnnnnnnnnnnnnnnnnnnnnnnnnnnnnnnnnnnnnnnnnnnnnnnnnnnnnnnnnnnnnnnnnnnnnnnnnnnnnnnnnnnnnnnnnnnnnnnnnnnnnnnnnnnnnnnnnnnnnnnnnnnnnnnnnnnnnnnnnnnnnnnnnnnnnnnnnnnnnnnnnnnnnnnnnnnnnnnnnnnnnnnnnnnnnnnnnnnnnnnnnnnnnnnnnnnnnnnnnnnnnnnnnnnnnnnnnnnnnnnnnnnnnnnnnnnnnnnnnnnnnnnnnnnnnnnnnnnnnnnnnnnnnnnnnnnnnnnnnnnnnnnnnnnnnnnnnnnnnnnnnnnnnnnnnnnnnnnnnnnnnnnnnnnnnnnnnnnnnnnnnnnnnnnnnnnnnnnnnnnnnnnnnnnnnnnnnnnnnnnnnnnnnnnnnnnnnnnnnnnnnnnnnnnnnnnnnnnnnnnnnnnnnnnnnnnnnnnnnnnnnnnnnnnnnnnnnnnnnnnnnnnnnnnnnnnnnnnnnnnnnnnnnnnnnnnnnnnnnnnnnnnnnnnnnnnnnnnnnnnnnnnnnnnnnnnnnnnnnnnnnnnnnnnnnnnnnnnnnnnnnnnnnnnnnnnnnnnnnnnnnnnnnnnnnnnnnnnnnnnnnnnnnnnnnnnnnnnnnnnnnnnnnnnnnnnnnnnnnnnnnnnnnnnnnnnnnnnnnnnnnnnnnnnnnnnnnnnnnnnnnnnnnnnnnnnnnnnnnnnnnnnnnnnnnnnnnnnnnnnnnnnnnnnnnnnnnnnnnnnnnnnnnnnnnnnnnnnnnnnnnnnnnnnnnnnnnnnnnnnnnnnnnnnnnnnnnnnnnnnnnnnnnnnnnnnnnnnnnnnnnnnnnnnnnnnnnnnnnnnnnnnnnnnnnnnnnnnnnnnnnnnnnnnnnnnnnnnnnnnnnnnnnnnnnnnnnnnnnnnnnnnnnnnnnnnnnnnnnnnnnnnnnnnnnnnnnnnnnnnnnnnnnnnnnnnnnnnnnnnnnnnnnnnnnnnnnnnnnnnnnnnnnnnnnnnnnnnnnnnnnnnnnnnnnnnnnnnnnnnnnnnnnnnnnnnnnnnnnnnnnnnnnnnnnnnnnnnnnnnnnnnnnnnnnnnnnnnnnnnnnnnnnnnnnnnnnnnnnnnnnnnnnnnnnnnnnnnnnnnnnnnnnnnnnnnnnnnnnnnnnnnnnnnnnnnnnnnnnnnnnnnnnnnnnnnnnnnnnnnnnnnnnnnnnnnnnnnnnnnnnnnnnnnnnnnnnnnnnnnnnnnnnnnnnnnnnnnnnnnnnnnnnnnnnnnnnnnnnnnnnnnnnnnnnnnnnnnnnnnnnnnnnnnnnnnnnnnnnnnnnnnnnnnnnnnnnnnnnnnnnnnnnnnnnnnnnnnnnnnnnnnnnnnnnnnnnnnnnnnnnnnnnnnnnnnnnnnnnnnnnnnnnnnnnnnnnnnnnnnnnnnnnnnnnnnnnnnnnnnnnnnnnnnnnnnnnnnnnnnnnnnnnnnnnnnnnnnnnnnnnnnnnnnnnnnnnnnnnnnnnnnnnnnnnnnnnnnnnnnnnnnnnnnnnnnnnnnnnnnnnnnnnnnnnnnnnnnnnnnnnnnnnnnnnnnnnnnnnnnnnnnnnnnnnnnnnnnnnnnnnnnnnnnnnnnnnnnnnnnnnnnnnnnnnnnnnnnnnnnnnnnnnnnnnnnnnnnnnnnnnnnnnnnnnnnnnnnnnnnnnnnnnnnnnnnnnnnnnnnnnnnnnnnnnnnnnnnnnnnnnnnnnnnnnnnnnnnnnnnnnnnnnnnnnnnnnnnnnnnnnnnnnnnnnnnnnnnnnnnnnnnnnnnnnnnnnnnnnnnnnnnnnnnnnnnnnnnnnnnnnnnnnnnnnnnnnnnnnnnnnnnnnnnnnnnnnnnnnnnnnnnnnnnnnnnnnnnnnnnnnnnnnnnnnnnnnnnnnnnnnnnnnnnnnnnnnnnnnnnnnnnnnnnnnnnnnnnnnnnnnnnnnnnnnnnnnnnnnnnnnnnnnnnnnnnnnnnnnnnnnnnnnnnnnnnnnnnnnnnnnnnnnnnnnnnnnnnnnnnnnnnnnnnnnnnnnnnnnnnnnnnnnnnnnnnnnnnnnnnnnnnnnnnnnnnnnnnnnnnnnnnnnnnnnnnnnnnnnnnnnnnnnnnnnnnnnnnnnnnnnnnnnnnnnnnnnnnnnnnnnnnnnnnnnnnnnnnnnnnnnnnnnnnnnnnnnnnnnnnnnnnnnnnnnnnnnnnnnnnnnnnnnnnnnnnnnnnnnnnnnnnnnnnnnnnnnnnnnnnnnnnnnnnnnnnnnnnnnnnnnnnnnnnnnnnnnnnnnnnnnnnnnnnnnnnnnnnnnnnnnnnnnnnnnnnnnnnnnnnnnnnnnnnnnnnnnnnnnnnnnnnnnnnnnnnnnnnnnnnnnnnnnnnnnnnnnnnnnnnnnnnnnnnnnnnnnnnnnnnnnnnnnnnnnnnnnnnnnnnnnnnnnnnnnnnnnnnnnnnnnnnnnnnnnnnnnnnnnnnnnnnnnnnnnnnnnnnnnnnnnnnnnnnnnnnnnnnnnnnnnnnnnnnnnnnnnnnnnnnnnnnnnnnnnnnnnnnnnnnnnnnnnnnnnnnnnnnnnnnnnnnnnnnnnnnnnnnnnnnnnnnnnnnnnnnnnnnnnnnnnnnnnnnnnnnnnnnnnnnnnnnnnnnnnnnnnnnnnnnnnnnnnnnnnnnnnnnnnnnnnnnnnnnnnnnnnnnnnnnnnnnnnnnnnnnnnnnnnnnnnnnnnnnnnnnnnnnnnnnnnnnnnnnnnnnnnnnnnnnnnnnnnnnnnnnnnnnnnnnnnnnnnnnnnnnnnnnnnnnnnnnnnnnnnnnnnnnnnnnnnnnnnnnnnnnnnnnnnnnnnnnnnnnnnnnnnnnnnnnnnnnnnnnnnnnnnnnnnnnnnnnnnnnnnnnnnnnnnnnnnnnnnnnnnnnnnnnnnnnnnnnnnnnnnnnnnnnnnnnnnnnnnnnnnnnnnnnnnnnnnnnnnnnnnnnnnnnnnnnnnnnnnnnnnnnnnnnnnnnnnnnnnnnnnnnnnnnnnnnnnnnnnnnnnnnnnnnnnnnnnnnnnnnnnnnnnnnnnnnnnnnnnnnnnnnnnnnnnnnnnnnnnnnnnnnnnnnnnnnnnnnnnnnnnnnnnnnnnnnnnnnnnnnnnnnnnnnnnnnnnnnnnnnnnnnnnnnnnnnnnnnnnnnnnnnnnnnnnnnnnnnnnnnnnnnnnnnnnnnnnnnnnnnnnnnnnnnnnnnnnnnnnnnnnnnnnnnnnnnnnnnnnnnnnnnnnnnnnnnnnnnnnnnnnnnnnnnnnnnnnnnnnnnnnnnnnnnnnnnnnnnnnnnnnnnnnnnnnnnnnnnnnnnnnnnnnnnnnnnnnnnnnnnnnnnnnnnnnnnnnnnnnnnnnnnnnnnnnnnnnnnnnnnnnnnnnnnnnnnnnnnnnnnnnnnnnnnnnnnnnnnnnnnnnnnnnnnnnnnnnnnnnnnnnnnnnnnnnnnnnnnnnnnnnnnnnnnnnnnnnnnnnnnnnnnnnnnnnnnnnnnnnnnnnnnnnnnnnnnnnnnnnnnnnnnnnnnnnnnnnnnnnnnnnnnnnnnnnnnnnnnnnnnnnnnnnnnnnnnnnnnnnnnnnnnnnnnnnnnnnnnnnnnnnnnnnnnnnnnnnnnnnnnnnnnnnnnnnnnnnnnnnnnnnnnnnnnnnnnnnnnnnnnnnnnnnnnnnnnnnnnnnnnnnnnnnnnnnnnnnnnnnnnnnnnnnnnnnnnnnnnnnnnnnnnnnnnnnnnnnnnnnnnnnnnnnnnnnnnnnnnnnnnnnnnnnnnnnnnnnnnnnnnnnnnnnnnnnnnnnnnnnnnnnnnnnnnnnnnnnnnnnnnnnnnnnnnnnnnnnnnnnnnnnnnnnnnnnnnnnnnnnnnnnnnnnnnnnnnnnnnnnnnnnnnnnnnnnnnnnnnnnnnnnnnnnnnnnnnnnnnnnnnnnnnnnnnnnnnnnnnnnnnnnnnnnnnnnnnnnnnnnnnnnnnnnnnnnnnnnnnnnnnnnnnnnnnnnnnnnnnnnnnnnnnnnnnnnnnnnnnnnnnnnnnnnnnnnnnnnnnnnnnnnnnnnnnnnnnnnnnnnnnnnnnnnnnnnnnnnnnnnnnnnnnnnnnnnnnnnnnnnnnnnnnnnnnnnnnnnnnnnnnnnnnnnnnnnnnnnnnnnnnnnnnnnnnnnnnnnnnnnnnnnnnnnnnnnnnnnnnnnnnnnnnnnnnnnnnnnnnnnnnnnnnnnnnnnnnnnnnnnnnnnnnnnnnnnnnnnnnnnnnnnnnnnnnnnnnnnnnnnnnnnnnnnnnnnnnnnnnnnnnnnnnnnnnnnnnnnnnnnnnnnnnnnnnnnnnnnnnnnnnnnnnnnnnnnnnnnnnnnnnnnnnnnnnnnnnnnnnnnnnnnnnnnnnnnnnnnnnnnnnnnnnnnnnnnnnnnnnnnnnnnnnnnnnnnnnnnnnnnnnnnnnnnnnnnnnnnnnnnnnnnnnnnnnnnnnnnnnnnnnnnnnnnnnnnnnnnnnnnnnnnnnnnnnnnnnnnnnnnnnnnnnnnnnnnnnnnnnnnnnnnnnnnnnnnnnnnnnnnnnnnnnnnnnnnnnnnnnnnnnnnnnnnnnnnnnnnnnnnnnnnnnnnnnnnnnnnnnnnnnnnnnnnnnnnnnnnnnnnnnnnnnnnnnnnnnnnnnnnnnnnnnnnnnnnnnnnnnnnnnnnnnnnnnnnnnnnnnnnnnnnnnnnnnnnnnnnnnnnnnnnnnnnnnnnnnnnnnnnnnnnnnnnnnnnnnnnnnnnnnnnnnnnnnnnnnnnnnnnnnnnnnnnnnnnnnnnnnnnnnnnnnnnnnnnnnnnnnnnnnnnnnnnnnnnnnnnnnnnnnnnnnnnnnnnnnnnnnnnnnnnnnnnnnnnnnnnnnnnnnnnnnnnnnnnnnnnnnnnnnnnnnnnnnnnnnnnnnnnnnnnnnnnnnnnnnnnnnnnnnnnnnnnnnnnnnnnnnnnnnnnnnnnnnnnnnnnnnnnnnnnnnnnnnnnnnnnnnnnnnnnnnnnnnnnnnnnnnnnnnnnnnnnnnnnnnnnnnnnnnnnnnnnnnnnnnnnnnnnnnnnnnnnnnnnnnnnnnnnnnnnnnnnnnnnnnnnnnnnnnnnnnnnnnnnnnnnnnnnnnnnnnnnnnnnnnnnnnnnnnnnnnnnnnnnnnnnnnnnnnnnnnnnnnnnnnnnnnnnnnnnnnnnnnnnnnnnnnnnnnnnnnnnnnnnnnnnnnnnnnnnnnnnnnnnnnnnnnnnnnnnnnnnnnnnnnnnnnnnnnnnnnnnnnnnnnnnnnnnnnnnnnnnnnnnnnnnnnnnnnnnnnnnnnnnnnnnnnnnnnnnnnnnnnnnnnnnnnnnnnnnnnnnnnnnnnnnnnnnnnnnnnnnnnnnnnnnnnnnnnnnnnnnnnnnnnnnnnnnnnnnnnnnnnnnnnnnnnnnnnnnnnnnnnnnnnnnnnnnnnnnnnnnnnnnnnnnnnnnnnnnnnnnnnnnnnnnnnnnnnnnnnnnnnnnnnnnnnnnnnnnnnnnnnnnnnnnnnnnnnnnnnnnnnnnnnnnnnnnnnnnnnnnnnnnnnnnnnnnnnnnnnnnnnnnnnnnnnnnnnnnnnnnnnnnnnnnnnnnnnnnnnnnnnnnnnnnnnnnnnnnnnnnnnnnnnnnnnnnnnnnnnnnnnnnnnnnnnnnnnnnnnnnnnnnnnnnnnnnnnnnnnnnnnnnnnnnnnnnnnnnnnnnnnnnnnnnnnnnnnnnnnnnnnnnnnnnnnnnnnnnnnnnnnnnnnnnnnnnnnnnnnnnnnnnnnnnnnnnnnnnnnnnnnnnnnnnnnnnnnnnnnnnnnnnnnnnnnnnnnnnnnnnnnnnnnnnnnnnnnnnnnnnnnnnnnnnnnnnnnnnnnnnnnnnnnnnnnnnnnnnnnnnnnnnnnnnnnnnnnnnnnnnnnnnnnnnnnnnnnnnnnnnnnnnnnnnnnnnnnnnnnnnnnnnnnnnnnnnnnnnnnnnnnnnnnnnnnnnnnnnnnnnnnnnnnnnnnnnnnnnnnnnnnnnnnnnnnnnnnnnnnnnnnnnnnnnnnnnnnnnnnnnnnnnnnnnnnnnnnnnnnnnnnnnnnnnnnnnnnnnnnnnnnnnnnnnnnnnnnnnnnnnnnnnnnnnnnnnnnnnnnnnnnnnnnnnnnnnnnnnnnnnnnnnnnnnnnnnnnnnnnnnnnnnnnnnnnnnnnnnnnnnnnnnnnnnnnnnnnnnnnnnnnnnnnnnnnnnnnnnnnnnnnnnnnnnnnnnnnnnnnnnnnnnnnnnnnnnnnnnnnnnnnnnnnnnnnnnnnnnnnnnnnnnnnnnnnnnnnnnnnnnnnnnnnnnnnnnnnnnnnnnnnnnnnnnnnnnnnnnnnnnnnnnnnnnnnnnnnnnnnnnnnnnnnnnnnnnnnnnnnnnnnnnnnnnnnnnnnnnnnnnnnnnnnnnnnnnnnnnnnnnnnnnnnnnnnnnnnnnnnnnnnnnnnnnnnnnnnnnnnnnnnnnnnnnnnnnnnnnnnnnnnnnnnnnnnnnnnnnnnnnnnnnnnnnnnnnnnnnnnnnnnnnnnnnnnnnnnnnnnnnnnnnnnnnnnnnnnnnnnnnnnnnnnnnnnnnnnnnnnnnnnnnnnnnnnnnnnnnnnnnnnnnnnnnnnnnnnnnnnnnnnnnnnnnnnnnnnnnnnnnnnnnnnnnnnnnnnnnnnnnnnnnnnnnnnnnnnnnnnnnnnnnnnnnnnnnnnnnnnnnnnnnnnnnnnnnnnnnnnnnnnnnnnnnnnnnnnnnnnnnnnnnnnnnnnnnnnnnnnnnnnnnnnnnnnnnnnnnnnnnnnnnnnnnnnnnnnnnnnnnnnnnnnnnnnnnnnnnnnnnnnnnnnnnnnnnnnnnnnnnnnnnnnnnnnnnnnnnnnnnnnnnnnnnnnnnnnnnnnnnnnnnnnnnnnnnnnnnnnnnnnnnnnnnnnnnnnnnnnnnnnnnnnnnnnnnnnnnnnnnnnnnnnnnnnnnnnnnnnnnnnnnnnnnnnnnnnnnnnnnnnnnnnnnnnnnnnnnnnnnnnnnnnnnnnnnnnnnnnnnnnnnnnnnnnnnnnnnnnnnnnnnnnnnnnnnnnnnnnnnnnnnnnnnnnnnnnnnnnnnnnnnnnnnnnnnnnnnnnnnnnnnnnnnnnnnnnnnnnnnnnnnnnnnnnnnnnnnnnnnnnnnnnnnnnnnnnnnnnnnnnnnnnnnnnnnnnnnnnnnnnnnnnnnnnnnnnnnnnnnnnnnnnnnnnnnnnnnnnnnnnnnnnnnnnnnnnnnnnnnnnnnnnnnnnnnnnnnnnnnnnnnnnnnnnnnnnnnnnnnnnnnnnnnnnnnnnnnnnnnnnnnnnnnnnnnnnnnnnnnnnnnnnnnnnnnnnnnnnnnnnnnnnnnnnnnnnnnnnnnnnnnnnnnnnnnnnnnnnnnnnnnnnnnnnnnnnnnnnnnnnnnnnnnnnnnnnnnnnnnnnnnnnnnnnnnnnnnnnnnnnnnnnnnnnnnnnnnnnnnnnnnnnnnnnnnnnnnnnnnnnnnnnnnnnnnnnnnnnnnnnnnnnnnnnnnnnnnnnnnnnnnnnnnnnnnnnnnnnnnnnnnnnnnnnnnnnnnnnnnnnnnnnnnnnnnnnnnnnnnnnnnnnnnnnnnnnnnnnnnnnnnnnnnnnnnnnnnnnnnnnnnnnnnnnnnnnnnnnnnnnnnnnnnnnnnnnnnnnnnnnnnnnnnnnnnnnnnnnnnnnnnnnnnnnnnnnnnnnnnnnnnnnnnnnnnnnnnnnnnnnnnnnnnnnnnnnnnnnnnnnnnnnnnnnnnnnnnnnnnnnnnnnnnnnnnnnnnnnnnnnnnnnnnnnnnnnnnnnnnnnnnnnnnnnnnnnnnnnnnnnnnnnnnnnnnnnnnnnnnnnnnnnnnnnnnnnnnnnnnnnnnnnnnnnnnnnnnnnnnnnnnnnnnnnnnnnnnnnnnnnnnnnnnnnnnnnnnnnnnnnnnnnnnnnnnnnnnnnnnnnnnnnnnnnnnnnnnnnnnnnnnnnnnnnnnnnnnnnnnnnnnnnnnnnnnnnnnnnnnnnnnnnnnnnnnnnnnnnnnnnnnnnnnnnnnnnnnnnnnnnnnnnnnnnnnnnnnnnnnnnnnnnnnnnnnnnnnnnnnnnnnnnnnnnnnnnnnnnnnnnnnnnnnnnnnnnnnnnnnnnnnnnnnnnnnnnnnnnnnnnnnnnnnnnnnnnnnnnnnnnnnnnnnnnnnnnnnnnnnnnnnnnnnnnnnnnnnnnnnnnnnnnnnnnnnnnnnnnnnnnnnnnnnnnnnnnnnnnnnnnnnnnnnnnnnnnnnnnnnnnnnnnnnnnnnnnnnnnnnnnnnnnnnnnnnnnnnnnnnnnnnnnnnnnnnnnnnnnnnnnnnnnnnnnnnnnnnnnnnnnnnnnnnnnnnnnnnnnnnnnnnnnnnnnnnnnnnnnnnnnnnnnnnnnnnnnnnnnnnnnnnnnnnnnnnnnnnnnnnnnnnnnnnnnnnnnnnnnnnnnnnnnnnnnnnnnnnnnnnnnnnnnnnnnnnnnnnnnnnnnnnnnnnnnnnnnnnnnnnnnnnnnnnnnnnnnnnnnnnnnnnnnnnnnnnnnnnnnnnnnnnnnnnnnnnnnnnnnnnnnnnnnnnnnnnnnnnnnnnnnnnnnnnnnnnnnnnnnnnnnnnnnnnnnnnnnnnnnnnnnnnnnnnnnnnnnnnnnnnnnnnnnnnnnnnnnnnnnnnnnnnnnnnnnnnnnnnnnnnnnnnnnnnnnnnnnnnnnnnnnnnnnnnnnnnnnnnnnnnnnnnnnnnnnnnnnnnnnnnnnnnnnnnnnnnnnnnnnnnnnnnnnnnnnnnnnnnnnnnnnnnnnnnnnnnnnnnnnnnnnnnnnnnnnnnnnnnnnnnnnnnnnnnnnnnnnnnnnnnnnnnnnnnnnnnnnnnnnnnnnnnnnnnnnnnnnnnnnnnnnnnnnnnnnnnnnnnnnnnnnnnnnnnnnnnnnnnnnnnnnnnnnnnnnnnnnnnnnnnnnnnnnnnnnnnnnnnnnnnnnnnnnnnnnnnnnnnnnnnnnnnnnnnnnnnnnnnnnnnnnnnnnnnnnnnnnnnnnnnnnnnnnnnnnnnnnnnnnnnnnnnnnnnnnnnnnnnnnnnnnnnnnnnnnnnnnnnnnnnnnnnnnnnnnnnnnnnnnnnnnnnnnnnnnnnnnnnnnnnnnnnnnnnnnnnnnnnnnnnnnnnnnnnnnnnnnnnnnnnnnnnnnnnnnnnnnnnnnnnnnnnnnnnnnnnnnnnnnnnnnnnnnnnnnnnnnnnnnnnnnnnnnnnnnnnnnnnnnnnnnnnnnnnnnnnnnnnnnnnnnnnnnnnnnnnnnnnnnnnnnnnnnnnnnnnnnnnnnnnnnnnnnnnnnnnnnnnnnnnnnnnnnnnnnnnnnnnnnnnnnnnnnnnnnnnnnnnnnnnnnnnnnnnnnnnnnnnnnnnnnnnnnnnnnnnnnnnnnnnnnnnnnnnnnnnnnnnnnnnnnnnnnnnnnnnnnnnnnnnnnnnnnnnnnnnnnnnnnnnnnnnnnnnnnnnnnnnnnnnnnnnnnnnnnnnnnnnnnnnnnnnnnnnnnnnnnnnnnnnnnnnnnnnnnnnnnnnnnnnnnnnnnnnnnnnnnnnnnnnnnnnnnnnnnnnnnnnnnnnnnnnnnnnnnnnnnnnnnnnnnnnnnnnnnnnnnnnnnnnnnnnnnnnnnnnnnnnnnnnnnnnnnnnnnnnnnnnnnnnnnnnnnnnnnnnnnnnnnnnnnnnnnnnnnnnnnnnnnnnnnnnnnnnnnnnnnnnnnnnnnnnnnnnnnnnnnnnnnnnnnnnnnnnnnnnnnnnnnnnnnnnnnnnnnnnnnnnnnnnnnnnnnnnnnnnnnnnnnnnnnnnnnnnnnnnnnnnnnnnnnnnnnnnnnnnnnnnnnnnnnnnnnnnnnnnnnnnnnnnnnnnnnnnnnnnnnnnnnnnnnnnnnnnnnnnnnnnnnnnnnnnnnnnnnnnnnnnnnnnnnnnnnnnnnnnnnnnnnnnnnnnnnnnnnnnnnnnnnnnnnnnnnnnnnnnnnnnnnnnnnnnnnnnnnnnnnnnnnnnnnnnnnnnnnnnnnnnnnnnnnnnnnnnnnnnnnnnnnnnnnnnnnnnnnnnnnnnnnnnnnnnnnnnnnnnnnnnnnnnnnnnnnnnnnnnnnnnnnnnnnnnnnnnnnnnnnnnnnnnnnnnnnnnnnnnnnnnnnnnnnnnnnnnnnnnnnnnnnnnnnnnnnnnnnnnnnnnnnnnnnnnnnnnnnnnnnnnnnnnnnnnnnnnnnnnnnnnnnnnnnnnnnnnnnnnnnnnnnnnnnnnnnnnnnnnnnnnnnnnnnnnnnnnnnnnnnnnnnnnnnnnnnnnnnnnnnnnnnnnnnnnnnnnnnnnnnnnnnnnnnnnnnnnnnnnnnnnnnnnnnnnnnnnnnnnnnnnnnnnnnnnnnnnnnnnnnnnnnnnnnnnnnnnnnnnnnnnnnnnnnnnnnnnnnnnnnnnnnnnnnnnnnnnnnnnnnnnnnnnnnnnnnnnnnnnnnnnnnnnnnnnnnnnnnnnnnnnnnnnnnnnnnnnnnnnnnnnnnnnnnnnnnnnnnnnnnnnnnnnnnnnnnnnnnnnnnnnnnnnnnnnnnnnnnnnnnnnnnnnnnnnnnnnnnnnnnnnnnnnnnnnnnnnnnnnnnnnnnnnnnnnnnnnnnnnnnnnnnnnnnnnnnnnnnnnnnnnnnnnnnnnnnnnnnnnnnnnnnnnnnnnnnnnnnnnnnnnnnnnnnnnnnnnnnnnnnnnnnnnnnnnnnnnnnnnnnnnnnnnnnnnnnnnnnnnnnnnnnnnnnnnnnnnnnnnnnnnnnnnnnnnnnnnnnnnnnnnnnnnnnnnnnnnnnnnnnnnnnnnnnnnnnnnnnnnnnnnnnnnnnnnnnnnnnnnnnnnnnnnnnnnnnnnnnnnnnnnnnnnnnnnnnnnnnnnnnnnnnnnnnnnnnnnnnnnnnnnnnnnnnnnnnnnnnnnnnnnnnnnnnnnnnnnnnnnnnnnnnnnnnnnnnnnnnnnnnnnnnnnnnnnnnnnnnnnnnnnnnnnnnnnnnnnnnnnnnnnnnnnnnnnnnnnnnnnnnnnnnnnnnnnnnnnnnnnnnnnnnnnnnnnnnnnnnnnnnnnnnnnnnnnnnnnnnnnnnnnnnnnnnnnnnnnnnnnnnnnnnnnnnnnnnnnnnnnnnnnnnnnnnnnnnnnnnnnnnnnnnnnnnnnnnnnnnnnnnnnnnnnnnnnnnnnnnnnnnnnnnnnnnnnnnnnnnnnnnnnnnnnnnnnnnnnnnnnnnnnnnnnnnnnnnnnnnnnnnnnnnnnnnnnnnnnnnnnnnnnnnnnnnnnnnnnnnnnnnnnnnnnnnnnnnnnnnnnnnnnnnnnnnnnnnnnnnnnnnnnnnnnnnnnnnnnnnnnnnnnnnnnnnnnnnnnnnnnnnnnnnnnnnnnnnnnnnnnnnnnnnnnnnnnnnnnnnnnnnnnnnnnnnnnnnnnnnnnnnnnnnnnnnnnnnnnnnnnnnnnnnnnnnnnnnnnnnnnnnnnnnnnnnnnnnnnnnnnnnnnnnnnnnnnnnnnnnnnnnnnnnnnnnnnnnnnnnnnnnnnnnnnnnnnnnnnnnnnnnnnnnnnnnnnnnnnnnnnnnnnnnnnnnnnnnnnnnnnnnnnnnnnnnnnnnnnnnnnnnnnnnnnnnnnnnnnnnnnnnnnnnnnnnnnnnnnnnnnnnnnnnnnnnnnnnnnnnnnnnnnnnnnnnnnnnnnnnnnnnnnnnnnnnnnnnnnnnnnnnnnnnnnnnnnnnnnnnnnnnnnnnnnnnnnnnnnnnnnnnnnnnnnnnnnnnnnnnnnnnnnnnnnnnnnnnnnnnnnnnnnnnnnnnnnnnnnnnnnnnnnnnnnnnnnnnnnnnnnnnnnnnnnnnnnnnnnnnnnnnnnnnnnnnnnnnnnnnnnnnnnnnnnnnnnnnnnnnnnnnnnnnnnnnnnnnnnnnnnnnnnnnnnnnnnnnnnnnnnnnnnnnnnnnnnnnnnnnnnnnnnnnnnnnnnnnnnnnnnnnnnnnnnnnnnnnnnnnnnnnnnnnnnnnnnnnnnnnnnnnnnnnnnnnnnnnnnnnnnnnnnnnnnnnnnnnnnnnnnnnnnnnnnnnnnnnnnnnnnnnnnnnnnnnnnnnnnnnnnnnnnnnnnnnnnnnnnnnnnnnnnnnnnnnnnnnnnnnnnnnnnnnnnnnnnnnnnnnnnnnnnnnnnnnnnnnnnnnnnnnnnnnnnnnnnnnnnnnnnnnnnnnnnnnnnnnnnnnnnnnnnnnnnnnnnnnnnnnnnnnnnnnnnnnnnnnnnnnnnnnnnnnnnnnnnnnnnnnnnnnnnnnnnnnnnnnnnnnnnnnnnnnnnnnnnnnnnnnnnnnnnnnnnnnnnnnnnnnnnnnnnnnnnnnnnnnnnnnnnnnnnnnnnnnnnnnnnnnnnnnnnnnnnnnnnnnnnnnnnnnnnnnnnnnnnnnnnnnnnnnnnnnnnnnnnnnnnnnnnnnnnnnnnnnnnnnnnnnnnnnnnnnnnnnnnnnnnnnnnnnnnnnnnnnnnnnnnnnnnnnnnnnnnnnnnnnnnnnnnnnnnnnnnnnnnnnnnnnnnnnnnnnnnnnnnnnnnnnnnnnnnnnnnnnnnnnnnnnnnnnnnnnnnnnnnnnnnnnnnnnnnnnnnnnnnnnnnnnnnnnnnnnnnnnnnnnnnnnnnnnnnnnnnnnnnnnnnnnnnnnnnnnnnnnnnnnnnnnnnnnnnnnnnnnnnnnnnnnnnnnnnnnnnnnnnnnnnnnnnnnnnnnnnnnnnnnnnnnnnnnnnnnnnnnnnnnnnnnnnnnnnnnnnnnnnnnnnnnnnnnnnnnnnnnnnnnnnnnnnnnnnnnnnnnnnnnnnnnnnnnnnnnnnnnnnnnnnnnnnnnnnnnnnnnnnnnnnnnnnnnnnnnnnnnnnnnnnnnnnnnnnnnnnnnnnnnnnnnnnnnnnnnnnnnnnnnnnnnnnnnnnnnnnnnnnnnnnnnnnnnnnnnnnnnnnnnnnnnnnnnnnnnnnnnnnnnnnnnnnnnnnnnnnnnnnnnnnnnnnnnnnnnnnnnnnnnnnnnnnnnnnnnnnnnnnnnnnnnnnnnnnnnnnnnnnnnnnnnnnnnnnnnnnnnnnnnnnnnnnnnnnnnnnnnnnnnnnnnnnnnnnnnnnnnnnnnnnnnnnnnnnnnnnnnnnnnnnnnnnnnnnnnnnnnnnnnnnnnnnnnnnnnnnnnnnnnnnnnnnnnnnnnnnnnnnnnnnnnnnnnnnnnnnnnnnnnnnnnnnnnnnnnnnnnnnnnnnnnnnnnnnnnnnnnnnnnnnnnnnnnnnnnnnnnnnnnnnnnnnnnnnnnnnnnnnnnnnnnnnnnnnnnnnnnnnnnnnnnnnnnnnnnnnnnnnnnnnnnnnnnnnnnnnnnnnnnnnnnnnnnnnnnnnnnnnnnnnnnnnnnnnnnnnnnnnnnnnnnnnnnnnnnnnnnnnnnnnnnnnnnnnnnnnnnnnnnnnnnnnnnnnnnnnnnnnnnnnnnnnnnnnnnnnnnnnnnnnnnnnnnnnnnnnnnnnnnnnnnnnnnnnnnnnnnnnnnnnnnnnnnnnnnnnnnnnnnnnnnnnnnnnnnnnnnnnnnnnnnnnnnnnnnnnnnnnnnnnnnnnnnnnnnnnnnnnnnnnnnnnnnnnnnnnnnnnnnnnnnnnnnnnnnnnnnnnnnnnnnnnnnnnnnnnnnnnnnnnnnnnnnnnnnnnnnnnnnnnnnnnnnnnnnnnnnnnnnnnnnnnnnnnnnnnnnnnnnnnnnnnnnnnnnnnnnnnnnnnnnnnnnnnnnnnnnnnnnnnnnnnnnnnnnnnnnnnnnnnnnnnnnnnnnnnnnnnnnnnnnnnnnnnnnnnnnnnnnnnnnnnnnnnnnnnnnnnnnnnnnnnnnnnnnnnnnnnnnnnnnnnnnnnnnnnnnnnnnnnnnnnnnnnnnnnnnnnnnnnnnnnnnnnnnnnnnnnnnnnnnnnnnnnnnnnnnnnnnnnnnnnnnnnnnnnnnnnnnnnnnnnnnnnnnnnnnnnnnnnnnnnnnnnnnnnnnnnnnnnnnnnnnnnnnnnnnnnnnnnnnnnnnnnnnnnnnnnnnnnnnnnnnnnnnnnnnnnnnnnnnnnnnnnnnnnnnnnnnnnnnnnnnnnnnnnnnnnnnnnnnnnnnnnnnnnnnnnnnnnnnnnnnnnnnnnnnnnnnnnnnnnnnnnnnnnnnnnnnnnnnnnnnnnnnnnnnnnnnnnnnnnnnnnnnnnnnnnnnnnnnnnnnnnnnnnnnnnnnnnnnnnnnnnnnnnnnnnnnnnnnnnnnnnnnnnnnnnnnnnnnnnnnnnnnnnnnnnnnnnnnnnnnnnnnnnnnnnnnnnnnnnnnnnnnnnnnnnnnnnnnnnnnnnnnnnnnnnnnnnnnnnnnnnnnnnnnnnnnnnnnnnnnnnnnnnnnnnnnnnnnnnnnnnnnnnnnnnnnnnnnnnnnnnnnnnnnnnnnnnnnnnnnnnnnnnnnnnnnnnnnnnnnnnnnnnnnnnnnnnnnnnnnnnnnnnnnnnnnnnnnnnnnnnnnnnnnnnnnnnnnnnnnnnnnnnnnnnnnnnnnnnnnnnnnnnnnnnnnnnnnnnnnnnnnnnnnnnnnnnnnnnnnnnnnnnnnnnnnnnnnnnnnnnnnnnnnnnnnnnnnnnnnnnnnnnnnnnnnnnnnnnnnnnnnnnnnnnnnnnnnnnnnnnnnnnnnnnnnnnnnnnnnnnnnnnnnnnnnnnnnnnnnnnnnnnnnnnnnnnnnnnnnnnnnnnnnnnnnnnnnnnnnnnnnnnnnnnnnnnnnnnnnnnnnnnnnnnnnnnnnnnnnnnnnnnnnnnnnnnnnnnnnnnnnnnnnnnnnnnnnnnnnnnnnnnnnnnnnnnnnnnnnnnnnnnnnnnnnnnnnnnnnnnnnnnnnnnnnnnnnnnnnnnnnnnnnnnnnnnnnnnnnnnnnnnnnnnnnnnnnnnnnnnnnnnnnnnnnnnnnnnnnnnnnnnnnnnnnnnnnnnnnnnnnnnnnnnnnnnnnnnnnnnnnnnnnnnnnnnnnnnnnnnnnnnnnnnnnnnnnnnnnnnnnnnnnnnnnnnnnnnnnnnnnnnnnnnnnnnnnnnnnnnnnnnnnnnnnnnnnnnnnnnnnnnnnnnnnnnnnnnnnnnnnnnnnnnnnnnnnnnnnnnnnnnnnnnnnnnnnnnnnnnnnnnnnnnnnnnnnnnnnnnnnnnnnnnnnnnnnnnnnnnnnnnnnnnnnnnnnnnnnnnnnnnnnnnnnnnnnnnnnnnnnnnnnnnnnnnnnnnnnnnnnnnnnnnnnnnnnnnnnnnnnnnnnnnnnnnnnnnnnnnnnnnnnnnnnnnnnnnnnnnnnnnnnnnnnnnnnnnnnnnnnnnnnnnnnnnnnnnnnnnnnnnnnnnnnnnnnnnnnnnnnnnnnnnnnnnnnnnnnnnnnnnnnnnnnnnnnnnnnnnnnnnnnnnnnnnnnnnnnnnnnnnnnnnnnnnnnnnnnnnnnnnnnnnnnnnnnnnnnnnnnnnnnnnnnnnnnnnnnnnnnnnnnnnnnnnnnnnnnnnnnnnnnnnnnnnnnnnnnnnnnnnnnnnnnnnnnnnnnnnnnnnnnnnnnnnnnnnnnnnnnnnnnnnnnnnnnnnnnnnnnnnnnnnnnnnnnnnnnnnnnnnnnnnnnnnnnnnnnnnnnnnnnnnnnnnnnnnnnnnnnnnnnnnnnnnnnnnnnnnnnnnnnnnnnnnnnnnnnnnnnnnnnnnnnnnnnnnnnnnnnnnnnnnnnnnnnnnnnnnnnnnnnnnnnnnnnnnnnnnnnnnnnnnnnnnnnnnnnnnnnnnnnnnnnnnnnnnnnnnnnnnnnnnnnnnnnnnnnnnnnnnnnnnnnnnnnnnnnnnnnnnnnnnnnnnnnnnnnnnnnnnnnnnnnnnnnnnnnnnnnnnnnnnnnnnnnnnnnnnnnnnnnnnnnnnnnnnnnnnnnnnnnnnnnnnnnnnnnnnnnnnnnnnnnnnnnnnnnnnnnnnnnnnnnnnnnnnnnnnnnnnnnnnnnnnnnnnnnnnnnnnnnnnnnnnnnnnnnnnnnnnnnnnnnnnnnnnnnnnnnnnnnnnnnnnnnnnnnnnnnnnnnnnnnnnnnnnnnnnnnnnnnnnnnnnnnnnnnnnnnnnnnnnnnnnnnnnnnnnnnnnnnnnnnnnnnnnnnnnnnnnnnnnnnnnnnnnnnnnnnnnnnnnnnnnnnnnnnnnnnnnnnnnnnnnnnnnnnnnnnnnnnnnnnnnnnnnnnnnnnnnnnnnnnnnnnnnnnnnnnnnnnnnnnnnnnnnnnnnnnnnnnnnnnnnnnnnnnnnnnnnnnnnnnnnnnnnnnnnnnnnnnnnnnnnnnnnnnnnnnnnnnnnnnnnnnnnnnnnnnnnnnnnnnnnnnnnnnnnnnnnnnnnnnnnnnnnnnnnnnnnnnnnnnnnnnnnnnnnnnnnnnnnnnnnnnnnnnnnnnnnnnnnnnnnnnnnnnnnnnnnnnnnnnnnnnnnnnnnnnnnnnnnnnnnnnnnnnnnnnnnnnnnnnnnnnnnnnnnnnnnnnnnnnnnnnnnnnnnnnnnnnnnnnnnnnnnnnnnnnnnnnnnnnnnnnnnnnnnnnnnnnnnnnnnnnnnnnnnnnnnnnnnnnnnnnnnnnnnnnnnnnnnnnnnnnnnnnnnnnnnnnnnnnnnnnnnnnnnnnnnnnnnnnnnnnnnnnnnnnnnnnnnnnnnnnnnnnnnnnnnnnnnnnnnnnnnnnnnnnnnnnnnnnnnnnnnnnnnnnnnnnnnnnnnnnnnnnnnnnnnnnnnnnnnnnnnnnnnnnnnnnnnnnnnnnnnnnnnnnnnnnnnnnnnnnnnnnnnnnnnnnnnnnnnnnnnnnnnnnnnnnnnnnnnnnnnnnnnnnnnnnnnnnnnnnnnnnnnnnnnnnnnnnnnnnnnnnnnnnnnnnnnnnnnnnnnnnnnnnnnnnnnnnnnnnnnnnnnnnnnnnnnnnnnnnnnnnnnnnnnnnnnnnnnnnnnnnnnnnnnnnnnnnnnnnnnnnnnnnnnnnnnnnnnnnnnnnnnnnnnnnnnnnnnnnnnnnnnnnnnnnnnnnnnnnnnnnnnnnnnnnnnnnnnnnnnnnnnnnnnnnnnnnnnnnnnnnnnnnnnnnnnnnnnnnnnnnnnnnnnnnnnnnnnnnnnnnnnnnnnnnnnnnnnnnnnnnnnnnnnnnnnnnnnnnnnnnnnnnnnnnnnnnnnnnnnnnnnnnnnnnnnnnnnnnnnnnnnnnnnnnnnnnnnnnnnnnnnnnnnnnnnnnnnnnnnnnnnnnnnnnnnnnnnnnnnnnnnnnnnnnnnnnnnnnnnnnnnnnnnnnnnnnnnnnnnnnnnnnnnnnnnnnnnnnnnnnnnnnnnnnnnnnnnnnnnnnnnnnnnnnnnnnnnnnnnnnnnnnnnnnnnnnnnnnnnnnnnnnnnnnnnnnnnnnnnnnnnnnnnnnnnnnnnnnnnnnnnnnnnnnnnnnnnnnnnnnnnnnnnnnnnnnnnnnnnnnnnnnnnnnnnnnnnnnnnnnnnnnnnnnnnnnnnnnnnnnnnnnnnnnnnnnnnnnnnnnnnnnnnnnnnnnnnnnnnnnnnnnnnnnnnnnnnnnnnnnnnnnnnnnnnnnnnnnnnnnnnnnnnnnnnnnnnnnnnnnnnnnnnnnnnnnnnnnnnnnnnnnnnnnnnnnnnnnnnnnnnnnnnnnnnnnnnnnnnnnnnnnnnnnnnnnnnnnnnnnnnnnnnnnnnnnnnnnnnnnnnnnnnnnnnnnnnnnnnnnnnnnnnnnnnnnnnnnnnnnnnnnnnnnnnnnnnnnnnnnnnnnnnnnnnnnnnnnnnnnnnnnnnnnnnnnnnnnnnnnnnnnnnnnnnnnnnnnnnnnnnnnnnnnnnnnnnnnnnnnnnnnnnnnnnnnnnnnnnnnnnnnnnnnnnnnnnnnnnnnnnnnnnnnnnnnnnnnnnnnnnnnnnnnnnnnnnnnnnnnnnnnnnnnnnnnnnnnnnnnnnnnnnnnnnnnnnnnnnnnnnnnnnnnnnnnnnnnnnnnnnnnnnnnnnnnnnnnnnnnnnnnnnnnnnnnnnnnnnnnnnnnnnnnnnnnnnnnnnnnnnnnnnnnnnnnnnnnnnnnnnnnnnnnnnnnnnnnnnnnnnnnnnnnnnnnnnnnnnnnnnnnnnnnnnnnnnnnnnnnnnnnnnnnnnnnnnnnnnnnnnnnnnnnnnnnnnnnnnnnnnnnnnnnnnnnnnnnnnnnnnnnnnnnnnnnnnnnnnnnnnnnnnnnnnnnnnnnnnnnnnnnnnnnnnnnnnnnnnnnnnnnnnnnnnnnnnnnnnnnnnnnnnnnnnnnnnnnnnnnnnnnnnnnnnnnnnnnnnnnnnnnnnnnnnnnnnnnnnnnnnnnnnnnnnnnnnnnnnnnnnnnnnnnnnnnnnnnnnnnnnnnnnnnnnnnnnnnnnnnnnnnnnnnnnnnnnnnnnnnnnnnnnnnnnnnnnnnnnnnnnnnnnnnnnnnnnnnnnnnnnnnnnnnnnnnnnnnnnnnnnnnnnnnnnnnnnnnnnnnnnnnnnnnnnnnnnnnnnnnnnnnnnnnnnnnnnnnnnnnnnnnnnnnnnnnnnnnnnnnnnnnnnnnnnnnnnnnnnnnnnnnnnnnnnnnnnnnnnnnnnnnnnnnnnnnnnnnnnnnnnnnnnnnnnnnnnnnnnnnnnnnnnnnnnnnnnnnnnnnnnnnnnnnnnnnnnnnnnnnnnnnnnnnnnnnnnnnnnnnnnnnnnnnnnnnnnnnnnnnnnnnnnnnnnnnnnnnnnnnnnnnnnnnnnnnnnnnnnnnnnnnnnnnnnnnnnnnnnnnnnnnnnnnnnnnnnnnnnnnnnnnnnnnnnnnnnnnnnnnnnnnnnnnnnnnnnnnnnnnnnnnnnnnnnnnnnnnnnnnnnnnnnnnnnnnnnnnnnnnnnnnnnnnnnnnnnnnnnnnnnnnnnnnnnnnnnnnnnnnnnnnnnnnnnnnnnnnnnnnnnnnnnnnnnnnnnnnnnnnnnnnnnnnnnnnnnnnnnnnnnnnnnnnnnnnnnnnnnnnnnnnnnnnnnnnnnnnnnnnnnnnnnnnnnnnnnnnnnnnnnnnnnnnnnnnnnnnnnnnnnnnnnnnnnnnnnnnnnnnnnnnnnnnnnnnnnnnnnnnnnnnnnnnnnnnnnnnnnnnnnnnnnnnnnnnnnnnnnnnnnnnnnnnnnnnnnnnnnnnnnnnnnnnnnnnnnnnnnnnnnnnnnnnnnnnnnnnnnnnnnnnnnnnnnnnnnnnnnnnnnnnnnnnnnnnnnnnnnnnnnnnnnnnnnnnnnnnnnnnnnnnnnnnnnnnnnnnnnnnnnnnnnnnnnnnnnnnnnnnnnnnnnnnnnnnnnnnnnnnnnnnnnnnnnnnnnnnnnnnnnnnnnnnnnnnnnnnnnnnnnnnnnnnnnnnnnnnnnnnnnnnnnnnnnnnnnnnnnnnnnnnnnnnnnnnnnnnnnnnnnnnnnnnnnnnnnnnnnnnnnnnnnnnnnnnnnnnnnnnnnnnnnnnnnnnnnnnnnnnnnnnnnnnnnnnnnnnnnnnnnnnnnnnnnnnnnnnnnnnnnnnnnnnnnnnnnnnnnnnnnnnnnnnnnnnnnnnnnnnnnnnnnnnnnnnnnnnnnnnnnnnnnnnnnnnnnnnnnnnnnnnnnnnnnnnnnnnnnnnnnnnnnnnnnnnnnnnnnnnnnnnnnnnnnnnnnnnnnnnnnnnnnnnnnnnnnnnnnnnnnnnnnnnnnnnnnnnnnnnnnnnnnnnnnnnnnnnnnnnnnnnnnnnnnnnnnnnnnnnnnnnnnnnnnnnnnnnnnnnnnnnnnnnnnnnnnnnnnnnnnnnnnnnnnnnnnnnnnnnnnnnnnnnnnnnnnnnnnnnnnnnnnnnnnnnnnnnnnnnnnnnnnnnnnnnnnnnnnnnnnnnnnnnnnnnnnnnnnnnnnnnnnnnnnnnnnnnnnnnnnnnnnnnnnnnnnnnnnnnnnnnnnnnnnnnnnnnnnnnnnnnnnnnnnnnnnnnnnnnnnnnnnnnnnnnnnnnnnnnnnnnnnnnnnnnnnnnnnnnnnnnnnnnnnnnnnnnnnnnnnnnnnnnnnnnnnnnnnnnnnnnnnnnnnnnnnnnnnnnnnnnnnnnnnnnnnnnnnnnnnnnnnnnnnnnnnnnnnnnnnnnnnnnnnnnnnnnnnnnnnnnnnnnnnnnnnnnnnnnnnnnnnnnnnnnnnnnnnnnnnnnnnnnnnnnnnnnnnnnnnnnnnnnnnnnnnnnnnnnnnnnnnnnnnnnnnnnnnnnnnnnnnnnnnnnnnnnnnnnnnnnnnnnnnnnnnnnnnnnnnnnnnnnnnnnnnnnnnnnnnnnnnnnnnnnnnnnnnnnnnnnnnnnnnnnnnnnnnnnnnnnnnnnnnnnnnnnnnnnnnnnnnnnnnnnnnnnnnnnnnnnnnnnnnnnnnnnnnnnnnnnnnnnnnnnnnnnnnnnnnnnnnnnnnnnnnnnnnnnnnnnnnnnnnnnnnnnnnnnnnnnnnnnnnnnnnnnnnnnnnnnnnnnnnnnnnnnnnnnnnnnnnnnnnnnnnnnnnnnnnnnnnnnnnnnnnnnnnnnnnnnnnnnnnnnnnnnnnnnnnnnnnnnnnnnnnnnnnnnnnnnnnnnnnnnnnnnnnnnnnnnnnnnnnnnnnnnnnnnnnnnnnnnnnnnnnnnnnnnnnnnnnnnnnnnnnnnnnnnnnnnnnnnnnnnnnnnnnnnnnnnnnnnnnnnnnnnnnnnnnnnnnnnnnnnnnnnnnnnnnnnnnnnnnnnnnnnnnnnnnnnnnnnnnnnnnnnnnnnnnnnnnnnnnnnnnnnnnnnnnnnnnnnnnnnnnnnnnnnnnnnnnnnnnnnnnnnnnnnnnnnnnnnnnnnnnnnnnnnnnnnnnnnnnnnnnnnnnnnnnnnnnnnnnnnnnnnnnnnnnnnnnnnnnnnnnnnnnnnnnnnnnnnnnnnnnnnnnnnnnnnnnnnnnnnnnnnnnnnnnnnnnnnnnnnnnnnnnnnnnnnnnnnnnnnnnnnnnnnnnnnnnnnnnnnnnnnnnnnnnnnnnnnnnnnnnnnnnnnnnnnnnnnnnnnnnnnnnnnnnnnnnnnnnnnnnnnnnnnnnnnnnnnnnnnnnnnnnnnnnnnnnnnnnnnnnnnnnnnnnnnnnnnnnnnnnnnnnnnnnnnnnnnnnnnnnnnnnnnnnnnnnnnnnnnnnnnnnnnnnnnnnnnnnnnnnnnnnnnnnnnnnnnnnnnnnnnnnnnnnnnnnnnnnnnnnnnnnnnnnnnnnnnnnnnnnnnnnnnnnnnnnnnnnnnnnnnnnnnnnnnnnnnnnnnnnnnnnnnnnnnnnnnnnnnnnnnnnnnnnnnnnnnnnnnnnnnnnnnnnnnnnnnnnnnnnnnnnnnnnnnnnnnnnnnnnnnnnnnnnnnnnnnnnnnnnnnnnnnnnnnnnnnnnnnnnnnnnnnnnnnnnnnnnnnnnnnnnnnnnnnnnnnnnnnnnnnnnnnnnnnnnnnnnnnnnnnnnnnnnnnnnnnnnnnnnnnnnnnnnnnnnnnnnnnnnnnnnnnnnnnnnnnnnnnnnnnnnnnnnnnnnnnnnnnnnnnnnnnnnnnnnnnnnnnnnnnnnnnnnnnnnnnnnnnnnnnnnnnnnnnnnnnnnnnnnnnnnnnnnnnnnnnnnnnnnnnnnnnnnnnnnnnnnnnnnnnnnnnnnnnnnnnnnnnnnnnnnnnnnnnnnnnnnnnnnnnnnnnnnnnnnnnnnnnnnnnnnnnnnnnnnnnnnnnnnnnnnnnnnnnnnnnnnnnnnnnnnnnnnnnnnnnnnnnnnnnnnnnnnnnnnnnnnnnnnnnnnnnnnnnnnnnnnnnnnnnnnnnnnnnnnnnnnnnnnnnnnnnnnnnnnnnnnnnnnnnnnnnnnnnnnnnnnnnnnnnnnnnnnnnnnnnnnnnnnnnnnnnnnnnnnnnnnnnnnnnnnnnnnnnnnnnnnnnnnnnnnnnnnnnnnnnnnnnnnnnnnnnnnnnnnnnnnnnnnnnnnnnnnnnnnnnnnnnnnnnnnnnnnnnnnnnnnnnnnnnnnnnnnnnnnnnnnnnnnnnnnnnnnnnnnnnnnnnnnnnnnnnnnnnnnnnnnnnnnnnnnnnnnnnnnnnnnnnnnnnnnnnnnnnnnnnnnnnnnnnnnnnnnnnnnnnnnnnnnnnnnnnnnnnnnnnnnnnnnnnnnnnnnnnnnnnnnnnnnnnnnnnnnnnnnnnnnnnnnnnnnnnnnnnnnnnnnnnnnnnnnnnnnnnnnnnnnnnnnnnnnnnnnnnnnnnnnnnnnnnnnnnnnnnnnnnnnnnnnnnnnnnnnnnnnnnnnnnnnnnnnnnnnnnnnnnnnnnnnnnnnnnnnnnnnnnnnnnnnnnnnnnnnnnnnnnnnnnnnnnnnnnnnnnnnnnnnnnnnnnnnnnnnnnnnnnnnnnnnnnnnnnnnnnnnnnnnnnnnnnnnnnnnnnnnnnnnnnnnnnnnnnnnnnnnnnnnnnnnnnnnnnnnnnnnnnnnnnnnnnnnnnnnnnnnnnnnnnnnnnnnnnnnnnnnnnnnnnnnnnnnnnnnnnnnnnnnnnnnnnnnnnnnnnnnnnnnnnnnnnnnnnnnnnnnnnnnnnnnnnnnnnnnnnnnnnnnnnnnnnnnnnnnnnnnnnnnnnnnnnnnnnnnnnnnnnnnnnnnnnnnnnnnnnnnnnnnnnnnnnnnnnnnnnnnnnnnnnnnnnnnnnnnnnnnnnnnnnnnnnnnnnnnnnnnnnnnnnnnnnnnnnnnnnnnnnnnnnnnnnnnnnnnnnnnnnnnnnnnnnnnnnnnnnnnnnnnnnnnnnnnnnnnnnnnnnnnnnnnnnnnnnnnnnnnnnnnnnnnnnnnnnnnnnnnnnnnnnnnnnnnnnnnnnnnnnnnnnnnnnnnnnnnnnnnnnnnnnnnnnnnnnnnnnnnnnnnnnnnnnnnnnnnnnnnnnnnnnnnnnnnnnnnnnnnnnnnnnnnnnnnnnnnnnnnnnnnnnnnnnnnnnnnnnnnnnnnnnnnnnnnnnnnnnnnnnnnnnnnnnnnnnnnnnnnnnnnnnnnnnnnnnnnnnnnnnnnnnnnnnnnnnnnnnnnnnnnnnnnnnnnnnnnnnnnnnnnnnnnnnnnnnnnnnnnnnnnnnnnnnnnnnnnnnnnnnnnnnnnnnnnnnnnnnnnnnnnnnnnnnnnnnnnnnnnnnnnnnnnnnnnnnnnnnnnnnnnnnnnnnnnnnnnnnnnnnnnnnnnnnnnnnnnnnnnnnnnnnnnnnnnnnnnnnnnnnnnnnnnnnnnnnnnnnnnnnnnnnnnnnnnnnnnnnnnnnnnnnnnnnnnnnnnnnnnnnnnnnnnnnnnnnnnnnnnnnnnnnnnnnnnnnnnnnnnnnnnnnnnnnnnnnnnnnnnnnnnnnnnnnnnnnnnnnnnnnnnnnnnnnnnnnnnnnnnnnnnnnnnnnnnnnnnnnnnnnnnnnnnnnnnnnnnnnnnnnnnnnnnnnnnnnnnnnnnnnnnnnnnnnnnnnnnnnnnnnnnnnnnnnnnnnnnnnnnnnnnnnnnnnnnnnnnnnnnnnnnnnnnnnnnnnnnnnnnnnnnnnnnnnnnnnnnnnnnnnnnnnnnnnnnnnnnnnnnnnnnnnnnnnnnnnnnnnnnnnnnnnnnnnnnnnnnnnnnnnnnnnnnnnnnnnnnnnnnnnnnnnnnnnnnnnnnnnnnnnnnnnnnnnnnnnnnnnnnnnnnnnnnnnnnnnnnnnnnnnnnnnnnnnnnnnnnnnnnnnnnnnnnnnnnnnnnnnnnnnnnnnnnnnnnnnnnnnnnnnnnnnnnnnnnnnnnnnnnnnnnnnnnnnnnnnnnnnnnnnnnnnnnnnnnnnnnnnnnnnnnnnnnnnnnnnnnnnnnnnnnnnnnnnnnnnnnnnnnnnnnnnnnnnnnnnnnnnnnnnnnnnnnnnnnnnnnnnnnnnnnnnnnnnnnnnnnnnnnnnnnnnnnnnnnnnnnnnnnnnnnnnnnnnnnnnnnnnnnnnnnnnnnnnnnnnnnnnnnnnnnnnnnnnnnnnnnnnnnnnnnnnnnnnnnnnnnnnnnnnnnnnnnnnnnnnnnnnnnnnnnnnnnnnnnnnnnnnnnnnnnnnnnnnnnnnnnnnnnnnnnnnnnnnnnnnnnnnnnnnnnnnnnnnnnnnnnnnnnnnnnnnnnnnnnnnnnnnnnnnnnnnnnnnnnnnnnnnnnnnnnnnnnnnnnnnnnnnnnnnnnnnnnnnnnnnnnnnnnnnnnnnnnnnnnnnnnnnnnnnnnnnnnnnnnnnnnnnnnnnnnnnnnnnnnnnnnnnnnnnnnnnnnnnnnnnnnnnnnnnnnnnnnnnnnnnnnnnnnnnnnnnnnnnnnnnnnnnnnnnnnnnnnnnnnnnnnnnnnnnnnnnnnnnnnnnnnnnnnnnnnnnnnnnnnnnnnnnnnnnnnnnnnnnnnnnnnnnnnnnnnnnnnnnnnnnnnnnnnnnnnnnnnnnnnnnnnnnnnnnnnnnnnnnnnnnnnnnnnnnnnnnnnnnnnnnnnnnnnnnnnnnnnnnnnnnnnnnnnnnnnnnnnnnnnnnnnnnnnnnnnnnnnnnnnnnnnnnnnnnnnnnnnnnnnnnnnnnnnnnnnnnnnnnnnnnnnnnnnnnnnnnnnnnnnnnnnnnnnnnnnnnnnnnnnnnnnnnnnnnnnnnnnnnnnnnnnnnnnnnnnnnnnnnnnnnnnnnnnnnnnnnnnnnnnnnnnnnnnnnnnnnnnnnnnnnnnnnnnnnnnnnnnnnnnnnnnnnnnnnnnnnnnnnnnnnnnnnnnnnnnnnnnnnnnnnnnnnnnnnnnnnnnnnnnnnnnnnnnnnnnnnnnnnnnnnnnnnnnnnnnnnnnnnnnnnnnnnnnnnnnnnnnnnnnnnnnnnnnnnnnnnnnnnnnnnnnnnnnnnnnnnnnnnnnnnnnnnnnnnnnnnnnnnnnnnnnnnnnnnnnnnnnnnnnnnnnnnnnnnnnnnnnnnnnnnnnnnnnnnnnnnnnnnnnnnnnnnnnnnnnnnnnnnnnnnnnnnnnnnnnnnnnnnnnnnnnnnnnnnnnnnnnnnnnnnnnnnnnnnnnnnnnnnnnnnnnnnnnnnnnnnnnnnnnnnnnnnnnnnnnnnnnnnnnnnnnnnnnnnnnnnnnnnnnnnnnnnnnnnnnnnnnnnnnnnnnnnnnnnnnnnnnnnnnnnnnnnnnnnnnnnnnnnnnnnnnnnnnnnnnnnnnnnnnnnnnnnnnnnnnnnnnnnnnnnnnnnnnnnnnnnnnnnnnnnnnnnnnnnnnnnnnnnnnnnnnnnnnnnnnnnnnnnnnnnnnnnnnnnnnnnnnnnnnnnnnnnnnnnnnnnnnnnnnnnnnnnnnnnnnnnnnnnnnnnnnnnnnnnnnnnnnnnnnnnnnnnnnnnnnnnnnnnnnnnnnnnnnnnnnnnnnnnnnnnnnnnnnnnnnnnnnnnnnnnnnnnnnnnnnnnnnnnnnnnnnnnnnnnnnnnnnnnnnnnnnnnnnnnnnnnnnnnnnnnnnnnnnnnnnnnnnnnnnnnnnnnnnnnnnnnnnnnnnnnnnnnnnnnnnnnnnnnnnnnnnnnnnnnnnnnnnnnnnnnnnnnnnnnnnnnnnnnnnnnnnnnnnnnnnnnnnnnnnnnnnnnnnnnnnnnnnnnnnnnnnnnnnnnnnnnnnnnnnnnnnnnnnnnnnnnnnnnnnnnnnnnnnnnnnnnnnnnnnnnnnnnnnnnnnnnnnnnnnnnnnnnnnnnnnnnnnnnnnnnnnnnnnnnnnnnnnnnnnnnnnnnnnnnnnnnnnnnnnnnnnnnnnnnnnnnnnnnnnnnnnnnnnnnnnnnnnnnnnnnnnnnnnnnnnnnnnnnnnnnnnnnnnnnnnnnnnnnnnnnnnnnnnnnnnnnnnnnnnnnnnnnnnnnnnnnnnnnnnnnnnnnnnnnnnnnnnnnnnnnnnnnnnnnnnnnnnnnnnnnnnnnnnnnnnnnnnnnnnnnnnnnnnnnnnnnnnnnnnnnnnnnnnnnnnnnnnnnnnnnnnnnnnnnnnnnnnnnnnnnnnnnnnnnnnnnnnnnnnnnnnnnnnnnnnnnnnnnnnnnnnnnnnnnnnnnnnnnnnnnnnnnnnnnnnnnnnnnnnnnnnnnnnnnnnnnnnnnnnnnnnnnnnnnnnnnnnnnnnnnnnnnnnnnnnnnnnnnnnnnnnnnnnnnnnnnnnnnnnnnnnnnnnnnnnnnnnnnnnnnnnnnnnnnnnnnnnnnnnnnnnnnnnnnnnnnnnnnnnnnnnnnnnnnnnnnnnnnnnnnnnnnnnnnnnnnnnnnnnnnnnnnnnnnnnnnnnnnnnnnnnnnnnnnnnnnnnnnnnnnnnnnnnnnnnnnnnnnnnnnnnnnnnnnnnnnnnnnnnnnnnnnnnnnnnnnnnnnnnnnnnnnnnnnnnnnnnnnnnnnnnnnnnnnnnnnnnnnnnnnnnnnnnnnnnnnnnnnnnnnnnnnnnnnnnnnnnnnnnnnnnnnnnnnnnnnnnnnnnnnnnnnnnnnnnnnnnnnnnnnnnnnnnnnnnnnnnnnnnnnnnnnnnnnnnnnnnnnnnnnnnnnnnnnnnnnnnnnnnnnnnnnnnnnnnnnnnnnnnnnnnnnnnnnnnnnnnnnnnnnnnnnnnnnnnnnnnnnnnnnnnnnnnnnnnnnnnnnnnnnnnnnnnnnnnnnnnnnnnnnnnnnnnnnnnnnnnnnnnnnnnnnnnnnnnnnnnnnnnnnnnnnnnnnnnnnnnnnnnnnnnnnnnnnnnnnnnnnnnnnnnnnnnnnnnnnnnnnnnnnnnnnnnnnnnnnnnnnnnnnnnnnnnnnnnnnnnnnnnnnnnnnnnnnnnnnnnnnnnnnnnnnnnnnnnnnnnnnnnnnnnnnnnnnnnnnnnnnnnnnnnnnnnnnnnnnnnnnnnnnnnnnnnnnnnnnnnnnnnnnnnnnnnnnnnnnnnnnnnnnnnnnnnnnnnnnnnnnnnnnnnnnnnnnnnnnnnnnnnnnnnnnnnnnnnnnnnnnnnnnnnnnnnnnnnnnnnnnnnnnnnnnnnnnnnnnnnnnnnnnnnnnnnnnnnnnnnnnnnnnnnnnnnnnnnnnnnnnnnnnnnnnnnnnnnnnnnnnnnnnnnnnnnnnnnnnnnnnnnnnnnnnnnnnnnnnnnnnnnnnnnnnnnnnnnnnnnnnnnnnnnnnnnnnnnnnnnnnnnnnnnnnnnnnnnnnnnnnnnnnnnnnnnnnnnnnnnnnnnnnnnnnnnnnnnnnnnnnnnnnnnnnnnnnnnnnnnnnnnnnnnnnnnnnnnnnnnnnnnnnnnnnnnnnnnnnnnnnnnnnnnnnnnnnnnnnnnnnnnnnnnnnnnnnnnnnnnnnnnnnnnnnnnnnnnnnnnnnnnnnnnnnnnnnnnnnnnnnnnnnnnnnnnnnnnnnnnnnnnnnnnnnnnnnnnnnnnnnnnnnnnnnnnnnnnnnnnnnnnnnnnnnnnnnnnnnnnnnnnnnnnnnnnnnnnnnnnnnnnnnnnnnnnnnnnnnnnnnnnnnnnnnnnnnnnnnnnnnnnnnnnnnnnnnnnnnnnnnnnnnnnnnnnnnnnnnnnnnnnnnnnnnnnnnnnnnnnnnnnnnnnnnnnnnnnnnnnnnnnnnnnnnnnnnnnnnnnnnnnnnnnnnnnnnnnnnnnnnnnnnnnnnnnnnnnnnnnnnnnnnnnnnnnnnnnnnnnnnnnnnnnnnnnnnnnnnnnnnnnnnnnnnnnnnnnnnnnnnnnnnnnnnnnnnnnnnnnnnnnnnnnnnnnnnnnnnnnnnnnnnnnnnnnnnnnnnnnnnnnnnnnnnnnnnnnnnnnnnnnnnnnnnnnnnnnnnnnnnnnnnnnnnnnnnnnnnnnnnnnnnnnnnnnnnnnnnnnnnnnnnnnnnnnnnnnnnnnnnnnnnnnnnnnnnnnnnnnnnnnnnnnnnnnnnnnnnnnnnnnnnnnnnnnnnnnnnnnnnnnnnnnnnnnnnnnnnnnnnnnnnnnnnnnnnnnnnnnnnnnnnnnnnnnnnnnnnnnnnnnnnnnnnnnnnnnnnnnnnnnnnnnnnnnnnnnnnnnnnnnnnnnnnnnnnnnnnnnnnnnnnnnnnnnnnnnnnnnnnnnnnnnnnnnnnnnnnnnnnnnnnnnnnnnnnnnnnnnnnnnnnnnnnnnnnnnnnnnnnnnnnnnnnnnnnnnnnnnnnnnnnnnnnnnnnnnnnnnnnnnnnnnnnnnnnnnnnnnnnnnnnnnnnnnnnnnnnnnnnnnnnnnnnnnnnnnnnnnnnnnnnnnnnnnnnnnnnnnnnnnnnnnnnnnnnnnnnnnnnnnnnnnnnnnnnnnnnnnnnnnnnnnnnnnnnnnnnnnnnnnnnnnnnnnnnnnnnnnnnnnnnnnnnnnnnnnnnnnnnnnnnnnnnnnnnnnnnnnnnnnnnnnnnnnnnnnnnnnnnnnnnnnnnnnnnnnnnnnnnnnnnnnnnnnnnnnnnnnnnnnnnnnnnnnnnnnnnnnnnnnnnnnnnnnnnnnnnnnnnnnnnnnnnnnnnnnnnnnnnnnnnnnnnnnnnnnnnnnnnnnnnnnnnnnnnnnnnnnnnnnnnnnnnnnnnnnnnnnnnnnnnnnnnnnnnnnnnnnnnnnnnnnnnnnnnnnnnnnnnnnnnnnnnnnnnnnnnnnnnnnnnnnnnnnnnnnnnnnnnnnnnnnnnnnnnnnnnnnnnnnnnnnnnnnnnnnnnnnnnnnnnnnnnnnnnnnnnnnnnnnnnnnnnnnnnnnnnnnnnnnnnnnnnnnnnnnnnnnnnnnnnnnnnnnnnnnnnnnnnnnnnnnnnnnnnnnnnnnnnnnnnnnnnnnnnnnnnnnnnnnnnnnnnnnnnnnnnnnnnnnnnnnnnnnnnnnnnnnnnnnnnnnnnnnnnnnnnnnnnnnnnnnnnnnnnnnnnnnnnnnnnnnnnnnnnnnnnnnnnnnnnnnnnnnnnnnnnnnnnnnnnnnnnnnnnnnnnnnnnnnnnnnnnnnnnnnnnnnnnnnnnnnnnnnnnnnnnnnnnnnnnnnnnnnnnnnnnnnnnnnnnnnnnnnnnnnnnnnnnnnnnnnnnnnnnnnnnnnnnnnnnnnnnnnnnnnnnnnnnnnnnnnnnnnnnnnnnnnnnnnnnnnnnnnnnnnnnnnnnnnnnnnnnnnnnnnnnnnnnnnnnnnnnnnnnnnnnnnnnnnnnnnnnnnnnnnnnnnnnnnnnnnnnnnnnnnnnnnnnnnnnnnnnnnnnnnnnnnnnnnnnnnnnnnnnnnnnnnnnnnnnnnnnnnnnnnnnnnnnnnnnnnnnnnnnnnnnnnnnnnnnnnnnnnnnnnnnnnnnnnnnnnnnnnnnnnnnnnnnnnnnnnnnnnnnnnnnnnnnnnnnnnnnnnnnnnnnnnnnnnnnnnnnnnnnnnnnnnnnnnnnnnnnnnnnnnnnnnnnnnnnnnnnnnnnnnnnnnnnnnnnnnnnnnnnnnnnnnnnnnnnnnnnnnnnnnnnnnnnnnnnnnnnnnnnnnnnnnnnnnnnnnnnnnnnnnnnnnnnnnnnnnnnnnnnnnnnnnnnnnnnnnnnnnnnnnnnnnnnnnnnnnnnnnnnnnnnnnnnnnnnnnnnnnnnnnnnnnnnnnnnnnnnnnnnnnnnnnnnnnnnnnnnnnnnnnnnnnnnnnnnnnnnnnnnnnnnnnnnnnnnnnnnnnnnnnnnnnnnnnnnnnnnnnnnnnnnnnnnnnnnnnnnnnnnnnnnnnnnnnnnnnnnnnnnnnnnnnnnnnnnnnnnnnnnnnnnnnnnnnnnnnnnnnnnnnnnnnnnnnnnnnnnnnnnnnnnnnnnnnnnnnnnnnnnnnnnnnnnnnnnnnnnnnnnnnnnnnnnnnnnnnnnnnnnnnnnnnnnnnnnnnnnnnnnnnnnnnnnnnnnnnnnnnnnnnnnnnnnnnnnnnnnnnnnnnnnnnnnnnnnnnnnnnnnnnnnnnnnnnnnnnnnnnnnnnnnnnnnnnnnnnnnnnnnnnnnnnnnnnnnnnnnnnnnnnnnnnnnnnnnnnnnnnnnnnnnnnnnnnnnnnnnnnnnnnnnnnnnnnnnnnnnnnnnnnnnnnnnnnnnnnnnnnnnnnnnnnnnnnnnnnnnnnnnnnnnnnnnnnnnnnnnnnnnnnnnnnnnnnnnnnnnnnnnnnnnnnnnnnnnnnnnnnnnnnnnnnnnnnnnnnnnnnnnnnnnnnnnnnnnnnnnnnnnnnnnnnnnnnnnnnnnnnnnnnnnnnnnnnnnnnnnnnnnnnnnnnnnnnnnnnnnnnnnnnnnnnnnnnnnnnnnnnnnnnnnnnnnnnnnnnnnnnnnnnnnnnnnnnnnnnnnnnnnnnnnnnnnnnnnnnnnnnnnnnnnnnnnnnnnnnnnnnnnnnnnnnnnnnnnnnnnnnnnnnnnnnnnnnnnnnnnnnnnnnnnnnnnnnnnnnnnnnnnnnnnnnnnnnnnnnnnnnnnnnnnnnnnnnnnnnnnnnnnnnnnnnnnnnnnnnnnnnnnnnnnnnnnnnnnnnnnnnnnnnnnnnnnnnnnnnnnnnnnnnnnnnnnnnnnnnnnnnnnnnnnnnnnnnnnnnnnnnnnnnnnnnnnnnnnnnnnnnnnnnnnnnnnnnnnnnnnnnnnnnnnnnnnnnnnnnnnnnnnnnnnnnnnnnnnnnnnnnnnnnnnnnnnnnnnnnnnnnnnnnnnnnnnnnnnnnnnnnnnnnnnnnnnnnnnnnnnnnnnnnnnnnnnnnnnnnnnnnnnnnnnnnnnnnnnnnnnnnnnnnnnnnnnnnnnnnnnnnnnnnnnnnnnnnnnnnnnnnnnnnnnnnnnnnnnnnnnnnnnnnnnnnnnnnnnnnnnnnnnnnnnnnnnnnnnnnnnnnnnnnnnnnnnnnnnnnnnnnnnnnnnnnnnnnnnnnnnnnnnnnnnnnnnnnnnnnnnnnnnnnnnnnnnnnnnnnnnnnnnnnnnnnnnnnnnnnnnnnnnnnnnnnnnnnnnnnnnnnnnnnnnnnnnnnnnnnnnnnnnnnnnnnnnnnnnnnnnnnnnnnnnnnnnnnnnnnnnnnnnnnnnnnnnnnnnnnnnnnnnnnnnnnnnnnnnnnnnnnnnnnnnnnnnnnnnnnnnnnnnnnnnnnnnnnnnnnnnnnnnnnnnnnnnnnnnnnnnnnnnnnnnnnnnnnnnnnnnnnnnnnnnnnnnnnnnnnnnnnnnnnnnnnnnnnnnnnnnnnnnnnnnnnnnnnnnnnnnnnnnnnnnnnnnnnnnnnnnnnnnnnnnnnnnnnnnnnnnnnnnnnnnnnnnnnnnnnnnnnnnnnnnnnnnnnnnnnnnnnnnnnnnnnnnnnnnnnnnnnnnnnnnnnnnnnnnnnnnnnnnnnnnnnnnnnnnnnnnnnnnnnnnnnnnnnnnnnnnnnnnnnnnnnnnnnnnnnnnnnnnnnnnnnnnnnnnnnnnnnnnnnnnnnnnnnnnnnnnnnnnnnnnnnnnnnnnnnnnnnnnnnnnnnnnnnnnnnnnnnnnnnnnnnnnnnnnnnnnnnnnnnnnnnnnnnnnnnnnnnnnnnnnnnnnnnnnnnnnnnnnnnnnnnnnnnnnnnnnnnnnnnnnnnnnnnnnnnnnnnnnnnnnnnnnnnnnnnnnnnnnnnnnnnnnnnnnnnnnnnnnnnnnnnnnnnnnnnnnnnnnnnnnnnnnnnnnnnnnnnnnnnnnnnnnnnnnnnnnnnnnnnnnnnnnnnnnnnnnnnnnnnnnnnnnnnnnnnnnnnnnnnnnnnnnnnnnnnnnnnnnnnnnnnnnnnnnnnnnnnnnnnnnnnnnnnnnnnnnnnnnnnnnnnnnnnnnnnnnnnnnnnnnnnnnnnnnnnnnnnnnnnnnnnnnnnnnnnnnnnnnnnnnnnnnnnnnnnnnnnnnnnnnnnnnnnnnnnnnnnnnnnnnnnnnnnnnnnnnnnnnnnnnnnnnnnnnnnnnnnnnnnnnnnnnnnnnnnnnnnnnnnnnnnnnnnnnnnnnnnnnnnnnnnnnnnnnnnnnnnnnnnnnnnnnnnnnnnnnnnnnnnnnnnnnnnnnnnnnnnnnnnnnnnnnnnnnnnnnnnnnnnnnnnnnnnnnnnnnnnnnnnnnnnnnnnnnnnnnnnnnnnnnnnnnnnnnnnnnnnnnnnnnnnnnnnnnnnnnnnnnnnnnnnnnnnnnnnnnnnnnnnnnnnnnnnnnnnnnnnnnnnnnnnnnnnnnnnnnnnnnnnnnnnnnnnnnnnnnnnnnnnnnnnnnnnnnnnnnnnnnnnnnnnnnnnnnnnnnnnnnnnnnnnnnnnnnnnnnnnnnnnnnnnnnnnnnnnnnnnnnnnnnnnnnnnnnnnnnnnnnnnnnnnnnnnnnnnnnnnnnnnnnnnnnnnnnnnnnnnnnnnnnnnnnnnnnnnnnnnnnnnnnnnnnnnnnnnnnnnnnnnnnnnnnnnnnnnnnnnnnnnnnnnnnnnnnnnnnnnnnnnnnnnnnnnnnnnnnnnnnnnnnnnnnnnnnnnnnnnnnnnnnnnnnnnnnnnnnnnnnnnnnnnnnnnnnnnnnnnnnnnnnnnnnnnnnnnnnnnnnnnnnnnnnnnnnnnnnnnnnnnnnnnnnnnnnnnnnnnnnnnnnnnnnnnnnnnnnnnnnnnnnnnnnnnnnnnnnnnnnnnnnnnnnnnnnnnnnnnnnnnnnnnnnnnnnnnnnnnnnnnnnnnnnnnnnnnnnnnnnnnnnnnnnnnnnnnnnnnnnnnnnnnnnnnnnnnnnnnnnnnnnnnnnnnnnnnnnnnnnnnnnnnnnnnnnnnnnnnnnnnnnnnnnnnnnnnnnnnnnnnnnnnnnnnnnnnnnnnnnnnnnnnnnnnnnnnnnnnnnnnnnnnnnnnnnnnnnnnnnnnnnnnnnnnnnnnnnnnnnnnnnnnnnnnnnnnnnnnnnnnnnnnnnnnnnnnnnnnnnnnnnnnnnnnnnnnnnnnnnnnnnnnnnnnnnnnnnnnnnnnnnnnnnnnnnnnnnnnnnnnnnnnnnnnnnnnnnnnnnnnnnnnnnnnnnnnnnnnnnnnnnnnnnnnnnnnnnnnnnnnnnnnnnnnnnnnnnnnnnnnnnnnnnnnnnnnnnnnnnnnnnnnnnnnnnnnnnnnnnnnnnnnnnnnnnnnnnnnnnnnnnnnnnnnnnnnnnnnnnnnnnnnnnnnnnnnnnnnnnnnnnnnnnnnnnnnnnnnnnnnnnnnnnnnnnnnnnnnnnnnnnnnnnnnnnnnnnnnnnnnnnnnnnnnnnnnnnnnnnnnnnnnnnnnnnnnnnnnnnnnnnnnnnnnnnnnnnnnnnnnnnnnnnnnnnnnnnnnnnnnnnnnnnnnnnnnnnnnnnnnnnnnnnnnnnnnnnnnnnnnnnnnnnnnnnnnnnnnnnnnnnnnnnnnnnnnnnnnnnnnnnnnnnnnnnnnnnnnnnnnnnnnnnnnnnnnnnnnnnnnnnnnnnnnnnnnnnnnnnnnnnnnnnnnnnnnnnnnnnnnnnnnnnnnnnnnnnnnnnnnnnnnnnnnnnnnnnnnnnnnnnnnnnnnnnnnnnnnnnnnnnnnnnnnnnnnnnnnnnnnnnnnnnnnnnnnnnnnnnnnnnnnnnnnnnnnnnnnnnnnnnnnnnnnnnnnnnnnnnnnnnnnnnnnnnnnnnnnnnnnnnnnnnnnnnnnnnnnnnnnnnnnnnnnnnnnnnnnnnnnnnnnnnnnnnnnnnnnnnnnnnnnnnnnnnnnnnnnnnnnnnnnnnnnnnnnnnnnnnnnnnnnnnnnnnnnnnnnnnnnnnnnnnnnnnnnnnnnnnnnnnnnnnnnnnnnnnnnnnnnnnnnnnnnnnnnnnnnnnnnnnnnnnnnnnnnnnnnnnnnnnnnnnnnnnnnnnnnnnnnnnnnnnnnnnnnnnnnnnnnnnnnnnnnnnnnnnnnnnnnnnnnnnnnnnnnnnnnnnnnnnnnnnnnnnnnnnnnnnnnnnnnnnnnnnnnnnnnnnnnnnnnnnnnnnnnnnnnnnnnnnnnnnnnnnnnnnnnnnnnnnnnnnnnnnnnnnnnnnnnnnnnnnnnnnnnnnnnnnnnnnnnnnnnnnnnnnnnnnnnnnnnnnnnnnnnnnnnnnnnnnnnnnnnnnnnnnnnnnnnnnnnnnnnnnnnnnnnnnnnnnnnnnnnnnnnnnnnnnnnnnnnnnnnnnnnnnnnnnnnnnnnnnnnnnnnnnnnnnnnnnnnnnnnnnnnnnnnnnnnnnnnnnnnnnnnnnnnnnnnnnnnnnnnnnnnnnnnnnnnnnnnnnnnnnnnnnnnnnnnnnnnnnnnnnnnnnnnnnnnnnnnnnnnnnnnnnnnnnnnnnnnnnnnnnnnnnnnnnnnnnnnnnnnnnnnnnnnnnnnnnnnnnnnnnnnnnnnnnnnnnnnnnnnnnnnnnnnnnnnnnnnnnnnnnnnnnnnnnnnnnnnnnnnnnnnnnnnnnnnnnnnnnnnnnnnnnnnnnnnnnnnnnnnnnnnnnnnnnnnnnnnnnnnnnnnnnnnnnnnnnnnnnnnnnnnnnnnnnnnnnnnnnnnnnnnnnnnnnnnnnnnnnnnnnnnnnnnnnnnnnnnnnnnnnnnnnnnnnnnnnnnnnnnnnnnnnnnnnnnnnnnnnnnnnnnnnnnnnnnnnnnnnnnnnnnnnnnnnnnnnnnnnnnnnnnnnnnnnnnnnnnnnnnnnnnnnnnnnnnnnnnnnnnnnnnnnnnnnnnnnnnnnnnnnnnnnnnnnnnnnnnnnnnnnnnnnnnnnnnnnnnnnnnnnnnnnnnnnnnnnnnnnnnnnnnnnnnnnnnnnnnnnnnnnnnnnnnnnnnnnnnnnnnnnnnnnnnnnnnnnnnnnnnnnnnnnnnnnnnnnnnnnnnnnnnnnnnnnnnnnnnnnnnnnnnnnnnnnnnnnnnnnnnnnnnnnnnnnnnnnnnnnnnnnnnnnnnnnnnnnnnnnnnnnnnnnnnnnnnnnnnnnnnnnnnnnnnnnnnnnnnnnnnnnnnnnnnnnnnnnnnnnnnnnnnnnnnnnnnnnnnnnnnnnnnnnnnnnnnnnnnnnnnnnnnnnnnnnnnnnnnnnnnnnnnnnnnnnnnnnnnnnnnnnnnnnnnnnnnnnnnnnnnnnnnnnnnnnnnnnnnnnnnnnnnnnnnnnnnnnnnnnnnnnnnnnnnnnnnnnnnnnnnnnnnnnnnnnnnnnnnnnnnnnnnnnnnnnnnnnnnnnnnnnnnnnnnnnnnnnnnnnnnnnnnnnnnnnnnnnnnnnnnnnnnnnnnnnnnnnnnnnnnnnnnnnnnnnnnnnnnnnnnnnnnnnnnnnnnnnnnnnnnnnnnnnnnnnnnnnnnnnnnnnnnnnnnnnnnnnnnnnnnnnnnnnnnnnnnnnnnnnnnnnnnnnnnnnnnnnnnnnnnnnnnnnnnnnnnnnnnnnnnnnnnnnnnnnnnnnnnnnnnnnnnnnnnnnnnnnnnnnnnnnnnnnnnnnnnnnnnnnnnnnnnnnnnnnnnnnnnnnnnnnnnnnnnnnnnnnnnnnnnnnnnnnnnnnnnnnnnnnnnnnnnnnnnnnnnnnnnnnnnnnnnnnnnnnnnnnnnnnnnnnnnnnnnnnnnnnnnnnnnnnnnnnnnnnnnnnnnnnnnnnnnnnnnnnnnnnnnnnnnnnnnnnnnnnnnnnnnnnnnnnnnnnnnnnnnnnnnnnnnnnnnnnnnnnnnnnnnnnnnnnnnnnnnnnnnnnnnnnnnnnnnnnnnnnnnnnnnnnnnnnnnnnnnnnnnnnnnnnnnnnnnnnnnnnnnnnnnnnnnnnnnnnnnnnnnnnnnnnnnnnnnnnnnnnnnnnnnnnnnnnnnnnnnnnnnnnnnnnnnnnnnnnnnnnnnnnnnnnnnnnnnnnnnnnnnnnnnnnnnnnnnnnnnnnnnnnnnnnnnnnnnnnnnnnnnnnnnnnnnnnnnnnnnnnnnnnnnnnnnnnnnnnnnnnnnnnnnnnnnnnnnnnnnnnnnnnnnnnnnnnnnnnnnnnnnnnnnnnnnnnnnnnnnnnnnnnnnnnnnnnnnnnnnnnnnnnnnnnnnnnnnnnnnnnnnnnnnnnnnnnnnnnnnnnnnnnnnnnnnnnnnnnnnnnnnnnnnnnnnnnnnnnnnnnnnnnnnnnnnnnnnnnnnnnnnnnnnnnnnnnnnnnnnnnnnnnnnnnnnnnnnnnnnnnnnnnnnnnnnnnnnnnnnnnnnnnnnnnnnnnnnnnnnnnnnnnnnnnnnnnnnnnnnnnnnnnnnnnnnnnnnnnnnnnnnnnnnnnnnnnnnnnnnnnnnnnnnnnnnnnnnnnnnnnnnnnnnnnnnnnnnnnnnnnnnnnnnnnnnnnnnnnnnnnnnnnnnnnnnnnnnnnnnnnnnnnnnnnnnnnnnnnnnnnnnnnnnnnnnnnnnnnnnnnnnnnnnnnnnnnnnnnnnnnnnnnnnnnnnnnnnnnnnnnnnnnnnnnnnnnnnnnnnnnnnnnnnnnnnnnnnnnnnnnnnnnnnnnnnnnnnnnnnnnnnnnnnnnnnnnnnnnnnnnnnnnnnnnnnnnnnnnnnnnnnnnnnnnnnnnnnnnnnnnnnnnnnnnnnnnnnnnnnnnnnnnnnnnnnnnnnnnnnnnnnnnnnnnnnnnnnnnnnnnnnnnnnnnnnnnnnnnnnnnnnnnnnnnnnnnnnnnnnnnnnnnnnnnnnnnnnnnnnnnnnnnnnnnnnnnnnnnnnnnnnnnnnnnnnnnnnnnnnnnnnnnnnnnnnnnnnnnnnnnnnnnnnnnnnnnnnnnnnnnnnnnnnnnnnnnnnnnnnnnnnnnnnnnnnnnnnnnnnnnnnnnnnnnnnnnnnnnnnnnnnnnnnnnnnnnnnnnnnnnnnnnnnnnnnnnnnnnnnnnnnnnnnnnnnnnnnnnnnnnnnnnnnnnnnnnnnnnnnnnnnnnnnnnnnnnnnnnnnnnnnnnnnnnnnnnnnnnnnnnnnnnnnnnnnnnnnnnnnnnnnnnnnnnnnnnnnnnnnnnnnnnnnnnnnnnnnnnnnnnnnnnnnnnnnnnnnnnnnnnnnnnnnnnnnnnnnnnnnnnnnnnnnnnnnnnnnnnnnnnnnnnnnnnnnnnnnnnnnnnnnnnnnnnnnnnnnnnnnnnnnnnnnnnnnnnnnnnnnnnnnnnnnnnnnnnnnnnnnnnnnnnnnnnnnnnnnnnnnnnnnnnnnnnnnnnnnnnnnnnnnnnnnnnnnnnnnnnnnnnnnnnnnnnnnnnnnnnnnnnnnnnnnnnnnnnnnnnnnnnnnnnnnnnnnnnnnnnnnnnnnnnnnnnnnnnnnnnnnnnnnnnnnnnnnnnnnnnnnnnnnnnnnnnnnnnnnnnnnnnnnnnnnnnnnnnnnnnnnnnnnnnnnnnnnnnnnnnnnnnnnnnnnnnnnnnnnnnnnnnnnnnnnnnnnnnnnnnnnnnnnnnnnnnnnnnnnnnnnnnnnnnnnnnnnnnnnnnnnnnnnnnnnnnnnnnnnnnnnnnnnnnnnnnnnnnnnnnnnnnnnnnnnnnnnnnnnnnnnnnnnnnnnnnnnnnnnnnnnnnnnnnnnnnnnnnnnnnnnnnnnnnnnnnnnnnnnnnnnnnnnnnnnnnnnnnnnnnnnnnnnnnnnnnnnnnnnnnnnnnnnnnnnnnnnnnnnnnnnnnnnnnnnnnnnnnnnnnnnnnnnnnnnnnnnnnnnnnnnnnnnnnnnnnnnnnnnnnnnnnnnnnnnnnnnnnnnnnnnnnnnnnnnnnnnnnnnnnnnnnnnnnnnnnnnnnnnnnnnnnnnnnnnnnnnnnnnnnnnnnnnnnnnnnnnnnnnnnnnnnnnnnnnnnnnnnnnnnnnnnnnnnnnnnnnnnnnnnnnnnnnnnnnnnnnnnnnnnnnnnnnnnnnnnnnnnnnnnnnnnnnnnnnnnnnnnnnnnnnnnnnnnnnnnnnnnnnnnnnnnnnnnnnnnnnnnnnnnnnnnnnnnnnnnnnnnnnnnnnnnnnnnnnnnnnnnnnnnnnnnnnnnnnnnnnnnnnnnnnnnnnnnnnnnnnnnnnnnnnnnnnnnnnnnnnnnnnnnnnnnnnnnnnnnnnnnnnnnnnnnnnnnnnnnnnnnnnnnnnnnnnnnnnnnnnnnnnnnnnnnnnnnnnnnnnnnnnnnnnnnnnnnnnnnnnnnnnnnnnnnnnnnnnnnnnnnnnnnnnnnnnnnnnnnnnnnnnnnnnnnnnnnnnnnnnnnnnnnnnnnnnnnnnnnnnnnnnnnnnnnnnnnnnnnnnnnnnnnnnnnnnnnnnnnnnnnnnnnnnnnnnnnnnnnnnnnnnnnnnnnnnnnnnnnnnnnnnnnnnnnnnnnnnnnnnnnnnnnnnnnnnnnnnnnnnnnnnnnnnnnnnnnnnnnnnnnnnnnnnnnnnnnnnnnnnnnnnnnnnnnnnnnnnnnnnnnnnnnnnnnnnnnnnnnnnnnnnnnnnnnnnnnnnnnnnnnnnnnnnnnnnnnnnnnnnnnnnnnnnnnnnnnnnnnnnnnnnnnnnnnnnnnnnnnnnnnnnnnnnnnnnnnnnnnnnnnnnnnnnnnnnnnnnnnnnnnnnnnnnnnnnnnnnnnnnnnnnnnnnnnnnnnnnnnnnnnnnnnnnnnnnnnnnnnnnnnnnnnnnnnnnnnnnnnnnnnnnnnnnnnnnnnnnnnnnnnnnnnnnnnnnnnnnnnnnnnnnnnnnnnnnnnnnnnnnnnnnnnnnnnnnnnnnnnnnnnnnnnnnnnnnnnnnnnnnnnnnnnnnnnnnnnnnnnnnnnnnnnnnnnnnnnnnnnnnnnnnnnnnnnnnnnnnnnnnnnnnnnnnnnnnnnnnnnnnnnnnnnnnnnnnnnnnnnnnnnnnnnnnnnnnnnnnnnnnnnnnnnnnnnnnnnnnnnnnnnnnnnnnnnnnnnnnnnnnnnnnnnnnnnnnnnnnnnnnnnnnnnnnnnnnnnnnnnnnnnnnnnnnnnnnnnnnnnnnnnnnnnnnnnnnnnnnnnnnnnnnnnnnnnnnnnnnnnnnnnnnnnnnnnnnnnnnnnnnnnnnnnnnnnnnnnnnnnnnnnnnnnnnnnnnnnnnnnnnnnnnnnnnnnnnnnnnnnnnnnnnnnnnnnnnnnnnnnnnnnnnnnnnnnnnnnnnnnnnnnnnnnnnnnnnnnnnnnnnnnnnnnnnnnnnnnnnnnnnnnnnnnnnnnnnnnnnnnnnnnnnnnnnnnnnnnnnnnnnnnnnnnnnnnnnnnnnnnnnnnnnnnnnnnnnnnnnnnnnnnnnnnnnnnnnnnnnnnnnnnnnnnnnnnnnnnnnnnnnnnnnnnnnnnnnnnnnnnnnnnnnnnnnnnnnnnnnnnnnnnnnnnnnnnnnnnnnnnnnnnnnnnnnnnnnnnnnnnnnnnnnnnnnnnnnnnnnnnnnnnnnnnnnnnnnnnnnnnnnnnnnnnnnnnnnnnnnnnnnnnnnnnnnnnnnnnnnnnnnnnnnnnnnnnnnnnnnnnnnnnnnnnnnnnnnnnnnnnnnnnnnnnnnnnnnnnnnnnnnnnnnnnnnnnnnnnnnnnnnnnnnnnnnnnnnnnnnnnnnnnnnnnnnnnnnnnnnnnnnnnnnnnnnnnnnnnnnnnnnnnnnnnnnnnnnnnnnnnnnnnnnnnnnnnnnnnnnnnnnnnnnnnnnnnnnnnnnnnnnnnnnnnnnnnnnnnnnnnnnnnnnnnnnnnnnnnnnnnnnnnnnnnnnnnnnnnnnnnnnnnnnnnnnnnnnnnnnnnnnnnnnnnnnnnnnnnnnnnnnnnnnnnnnnnnnnnnnnnnnnnnnnnnnnnnnnnnnnnnnnnnnnnnnnnnnnnnnnnnnnnnnnnnnnnnnnnnnnnnnnnnnnnnnnnnnnnnnnnnnnnnnnnnnnnnnnnnnnnnnnnnnnnnnnnnnnnnnnnnnnnnnnnnnnnnnnnnnnnnnnnnnnnnnnnnnnnnnnnnnnnnnnnnnnnnnnnnnnnnnnnnnnnnnnnnnnnnnnnnnnnnnnnnnnnnnnnnnnnnnnnnnnnnnnnnnnnnnnnnnnnnnnnnnnnnnnnnnnnnnnnnnnnnnnnnnnnnnnnnnnnnnnnnnnnnnnnnnnnnnnnnnnnnnnnnnnnnnnnnnnnnnnnnnnnnnnnnnnnnnnnnnnnnnnnnnnnnnnnnnnnnnnnnnnnnnnnnnnnnnnnnnnnnnnnnnnnnnnnnnnnnnnnnnnnnnnnnnnnnnnnnnnnnnnnnnnnnnnnnnnnnnnnnnnnnnnnnnnnnnnnnnnnnnnnnnnnnnnnnnnnnnnnnnnnnnnnnnnnnnnnnnnnnnnnnnnnnnnnnnnnnnnnnnnnnnnnnnnnnnnnnnnnnnnnnnnnnnnnnnnnnnnnnnnnnnnnnnnnnnnnnnnnnnnnnnnnnnnnnnnnnnnnnnnnnnnnnnnnnnnnnnnnnnnnnnnnnnnnnnnnnnnnnnnnnnnnnnnnnnnnnnnnnnnnnnnnnnnnnnnnnnnnnnnnnnnnnnnnnnnnnnnnnnnnnnnnnnnnnnnnnnnnnnnnnnnnnnnnnnnnnnnnnnnnnnnnnnnnnnnnnnnnnnnnnnnnnnnnnnnnnnnnnnnnnnnnnnnnnnnnnnnnnnnnnnnnnnnnnnnnnnnnnnnnnnnnnnnnnnnnnnnnnnnnnnnnnnnnnnnnnnnnnnnnnnnnnnnnnnnnnnnnnnnnnnnnnnnnnnnnnnnnnnnnnnnnnnnnnnnnnnnnnnnnnnnnnnnnnnnnnnnnnnnnnnnnnnnnnnnnnnnnnnnnnnnnnnnnnnnnnnnnnnnnnnnnnnnnnnnnnnnnnnnnnnnnnnnnnnnnnnnnnnnnnnnnnnnnnnnnnnnnnnnnnnnnnnnnnnnnnnnnnnnnnnnnnnnnnnnnnnnnnnnnnnnnnnnnnnnnnnnnnnnnnnnnnnnnnnnnnnnnnnnnnnnnnnnnnnnnnnnnnnnnnnnnnnnnnnnnnnnnnnnnnnnnnnnnnnnnnnnnnnnnnnnnnnnnnnnnnnnnnnnnnnnnnnnnnnnnnnnnnnnnnnnnnnnnnnnnnnnnnnnnnnnnnnnnnnnnnnnnnnnnnnnnnnnnnnnnnnnnnnnnnnnnnnnnnnnnnnnnnnnnnnnnnnnnnnnnnnnnnnnnnnnnnnnnnnnnnnnnnnnnnnnnnnnnnnnnnnnnnnnnnnnnnnnnnnnnnnnnnnnnnnnnnnnnnnnnnnnnnnnnnnnnnnnnnnnnnnnnnnnnnnnnnnnnnnnnnnnnnnnnnnnnnnnnnnnnnnnnnnnnnnnnnnnnnnnnnnnnnnnnnnnnnnnnnnnnnnnnnnnnnnnnnnnnnnnnnnnnnnnnnnnnnnnnnnnnnnnnnnnnnnnnnnnnnnnnnnnnnnnnnnnnnnnnnnnnnnnnnnnnnnnnnnnnnnnnnnnnnnnnnnnnnnnnnnnnnnnnnnnnnnnnnnnnnnnnnnnnnnnnnnnnnnnnnnnnnnnnnnnnnnnnnnnnnnnnnnnnnnnnnnnnnnnnnnnnnnnnnnnnnnnnnnnnnnnnnnnnnnnnnnnnnnnnnnnnnnnnnnnnnnnnnnnnnnnnnnnnnnnnnnnnnnnnnnnnnnnnnnnnnnnnnnnnnnnnnnnnnnnnnnnnnnnnnnnnnnnnnnnnnnnnnnnnnnnnnnnnnnnnnnnnnnnnnnnnnnnnnnnnnnnnnnnnnnnnnnnnnnnnnnnnnnnnnnnnnnnnnnnnnnnnnnnnnnnnnnnnnnnnnnnnnnnnnnnnnnnnnnnnnnnnnnnnnnnnnnnnnnnnnnnnnnnnnnnnnnnnnnnnnnnnnnnnnnnnnnnnnnnnnnnnnnnnnnnnnnnnnnnnnnnnnnnnnnnnnnnnnnnnnnnnnnnnnnnnnnnnnnnnnnnnnnnnnnnnnnnnnnnnnnnnnnnnnnnnnnnnnnnnnnnnnnnnnnnnnnnnnnnnnnnnnnnnnnnnnnnnnnnnnnnnnnnnnnnnnnnnnnnnnnnnnnnnnnnnnnnnnnnnnnnnnnnnnnnnnnnnnnnnnnnnnnnnnnnnnnnnnnnnnnnnnnnnnnnnnnnnnnnnnnnnnnnnnnnnnnnnnnnnnnnnnnnnnnnnnnnnnnnnnnnnnnnnnnnnnnnnnnnnnnnnnnnnnnnnnnnnnnnnnnnnnnnnnnnnnnnnnnnnnnnnnnnnnnnnnnnnnnnnnnnnnnnnnnnnnnnnnnnnnnnnnnnnnnnnnnnnnnnnnnnnnnnnnnnnnnnnnnnnnnnnnnnnnnnnnnnnnnnnnnnnnnnnnnnnnnnnnnnnnnnnnnnnnnnnnnnnnnnnnnnnnnnnnnnnnnnnnnnnnnnnnnnnnnnnnnnnnnnnnnnnnnnnnnnnnnnnnnnnnnnnnnnnnnnnnnnnnnnnnnnnnnnnnnnnnnnnnnnnnnnnnnnnnnnnnnnnnnnnnnnnnnnnnnnnnnnnnnnnnnnnnnnnnnnnnnnnnnnnnnnnnnnnnnnnnnnnnnnnnnnnnnnnnnnnnnnnnnnnnnnnnnnnnnnnnnnnnnnnnnnnnnnnnnnnnnnnnnnnnnnnnnnnnnnnnnnnnnnnnnnnnnnnnnnnnnnnnnnnnnnnnnnnnnnnnnnnnnnnnnnnnnnnnnnnnnnnnnnnnnnnnnnnnnnnnnnnnnnnnnnnnnnnnnnnnnnnnnnnnnnnnnnnnnnnnnnnnnnnnnnnnnnnnnnnnnnnnnnnnnnnnnnnnnnnnnnnnnnnnnnnnnnnnnnnnnnnnnnnnnnnnnnnnnnnnnnnnnnnnnnnnnnnnnnnnnnnnnnnnnnnnnnnnnnnnnnnnnnnnnnnnnnnnnnnnnnnnnnnnnnnnnnnnnnnnnnnnnnnnnnnnnnnnnnnnnnnnnnnnnnnnnnnnnnnnnnnnnnnnnnnnnnnnnnnnnnnnnnnnnnnnnnnnnnnnnnnnnnnnnnnnnnnnnnnnnnnnnnnnnnnnnnnnnnnnnnnnnnnnnnnnnnnnnnnnnnnnnnnnnnnnnnnnnnnnnnnnnnnnnnnnnnnnnnnnnnnnnnnnnnnnnnnnnnnnnnnnnnnnnnnnnnnnnnnnnnnnnnnnnnnnnnnnnnnnnnnnnnnnnnnnnnnnnnnnnnnnnnnnnnnnnnnnnnnnnnnnnnnnnnnnnnnnnnnnnnnnnnnnnnnnnnnnnnnnnnnnnnnnnnnnnnnnnnnnnnnnnnnnnnnnnnnnnnnnnnnnnnnnnnnnnnnnnnnnnnnnnnnnnnnnnnnnnnnnnnnnnnnnnnnnnnnnnnnnnnnnnnnnnnnnnnnnnnnnnnnnnnnnnnnnnnnnnnnnnnnnnnnnnnnnnnnnnnnnnnnnnnnnnnnnnnnnnnnnnnnnnnnnnnnnnnnnnnnnnnnnnnnnnnnnnnnnnnnnnnnnnnnnnnnnnnnnnnnnnnnnnnnnnnnnnnnnnnnnnnnnnnnnnnnnnnnnnnnnnnnnnnnnnnnnnnnnnnnnnnnnnnnnnnnnnnnnnnnnnnnnnnnnnnnnnnnnnnnnnnnnnnnnnnnnnnnnnnnnnnnnnnnnnnnnnnnnnnnnnnnnnnnnnnnnnnnnnnnnnnnnnnnnnnnnnnnnnnnnnnnnnnnnnnnnnnnnnnnnnnnnnnnnnnnnnnnnnnnnnnnnnnnnnnnnnnnnnnnnnnnnnnnnnnnnnnnnnnnnnnnnnnnnnnnnnnnnnnnnnnnnnnnnnnnnnnnnnnnnnnnnnnnnnnnnnnnnnnnnnnnnnnnnnnnnnnnnnnnnnnnnnnnnnnnnnnnnnnnnnnnnnnnnnnnnnnnnnnnnnnnnnnnnnnnnnnnnnnnnnnnnnnnnnnnnnnnnnnnnnnnnnnnnnnnnnnnnnnnnnnnnnnnnnnnnnnnnnnnnnnnnnnnnnnnnnnnnnnnnnnnnnnnnnnnnnnnnnnnnnnnnnnnnnnnnnnnnnnnnnnnnnnnnnnnnnnnnnnnnnnnnnnnnnnnnnnnnnnnnnnnnnnnnnnnnnnnnnnnnnnnnnnnnnnnnnnnnnnnnnnnnnnnnnnnnnnnnnnnnnnnnnnnnnnnnnnnnnnnnnnnnnnnnnnnnnnnnnnnnnnnnnnnnnnnnnnnnnnnnnnnnnnnnnnnnnnnnnnnnnnnnnnnnnnnnnnnnnnnnnnnnnnnnnnnnnnnnnnnnnnnnnnnnnnnnnnnnnnnnnnnnnnnnnnnnnnnnnnnnnnnnnnnnnnnnnnnnnnnnnnnnnnnnnnnnnnnnnnnnnnnnnnnnnnnnnnnnnnnnnnnnnnnnnnnnnnnnnnnnnnnnnnnnnnnnnnnnnnnnnnnnnnnnnnnnnnnnnnnnnnnnnnnnnnnnnnnnnnnnnnnnnnnnnnnnnnnnnnnnnnnnnnnnnnnnnnnnnnnnnnnnnnnnnnnnnnnnnnnnnnnnnnnnnnnnnnnnnnnnnnnnnnnnnnnnnnnnnnnnnnnnnnnnnnnnnnnnnnnnnnnnnnnnnnnnnnnnnnnnnnnnnnnnnnnnnnnnnnnnnnnnnnnnnnnnnnnnnnnnnnnnnnnnnnnnnnnnnnnnnnnnnnnnnnnnnnnnnnnnnnnnnnnnnnnnnnnnnnnnnnnnnnnnnnnnnnnnnnnnnnnnnnnnnnnnnnnnnnnnnnnnnnnnnnnnnnnnnnnnnnnnnnnnnnnnnnnnnnnnnnnnnnnnnnnnnnnnnnnnnnnnnnnnnnnnnnnnnnnnnnnnnnnnnnnnnnnnnnnnnnnnnnnnnnnnnnnnnnnnnnnnnnnnnnnnnnnnnnnnnnnnnnnnnnnnnnnnnnnnnnnnnnnnnnnnnnnnnnnnnnnnnnnnnnnnnnnnnnnnnnnnnnnnnnnnnnnnnnnnnnnnnnnnnnnnnnnnnnnnnnnnnnnnnnnnnnnnnnnnnnnnnnnnnnnnnnnnnnnnnnnnnnnnnnnnnnnnnnnnnnnnnnnnnnnnnnnnnnnnnnnnnnnnnnnnnnnnnnnnnnnnnnnnnnnnnnnnnnnnnnnnnnnnnnnnnnnnnnnnnnnnnnnnnnnnnnnnnnnnnnnnnnnnnnnnnnnnnnnnnnnnnnnnnnnnnnnnnnnnnnnnnnnnnnnnnnnnnnnnnnnnnnnnnnnnnnnnnnnnnnnnnnnnnnnnnnnnnnnnnnnnnnnnnnnnnnnnnnnnnnnnnnnnnnnnnnnnnnnnnnnnnnnnnnnnnnnnnnnnnnnnnnnnnnnnnnnnnnnnnnnnnnnnnnnnnnnnnnnnnnnnnnnnnnnnnnnnnnnnnnnnnnnnnnnnnnnnnnnnnnnnnnnnnnnnnnnnnnnnnnnnnnnnnnnnnnnnnnnnnnnnnnnnnnnnnnnnnnnnnnnnnnnnnnnnnnnnnnnnnnnnnnnnnnnnnnnnnnnnnnnnnnnnnnnnnnnnnnnnnnnnnnnnnnnnnnnnnnnnnnnnnnnnnnnnnnnnnnnnnnnnnnnnnnnnnnnnnnnnnnnnnnnnnnnnnnnnnnnnnnnnnnnnnnnnnnnnnnnnnnnnnnnnnnnnnnnnnnnnnnnnnnnnnnnnnnnnnnnnnnnnnnnnnnnnnnnnnnnnnnnnnnnnnnnnnnnnnnnnnnnnnnnnnnnnnnnnnnnnnnnnnnnnnnnnnnnnnnnnnnnnnnnnnnnnnnnnnnnnnnnnnnnnnnnnnnnnnnnnnnnnnnnnnnnnnnnnnnnnnnnnnnnnnnnnnnnnnnnnnnnnnnnnnnnnnnnnnnnnnnnnnnnnnnnnnnnnnnnnnnnnnnnnnnnnnnnnnnnnnnnnnnnnnnnnnnnnnnnnnnnnnnnnnnnnnnnnnnnnnnnnnnnnnnnnnnnnnnnnnnnnnnnnnnnnnnnnnnnnnnnnnnnnnnnnnnnnnnnnnnnnnnnnnnnnnnnnnnnnnnnnnnnnnnnnnnnnnnnnnnnnnnnnnnnnnnnnnnnnnnnnnnnnnnnnnnnnnnnnnnnnnnnnnnnnnnnnnnnnnnnnnnnnnnnnnnnnnnnnnnnnnnnnnnnnnnnnnnnnnnnnnnnnnnnnnnnnnnnnnnnnnnnnnnnnnnnnnnnnnnnnnnnnnnnnnnnnnnnnnnnnnnnnnnnnnnnnnnnnnnnnnnnnnnnnnnnnnnnnnnnnnnnnnnnnnnnnnnnnnnnnnnnnnnnnnnnnnnnnnnnnnnnnnnnnnnnnnnnnnnnnnnnnnnnnnnnnnnnnnnnnnnnnnnnnnnnnnnnnnnnnnnnnnnnnnnnnnnnnnnnnnnnnnnnnnnnnnnnnnnnnnnnnnnnnnnnnnnnnnnnnnnnnnnnnnnnnnnnnnnnnnnnnnnnnnnnnnnnnnnnnnnnnnnnnnnnnnnnnnnnnnnnnnnnnnnnnnnnnnnnnnnnnnnnnnnnnnnnnnnnnnnnnnnnnnnnnnnnnnnnnnnnnnnnnnnnnnnnnnnnnnnnnnnnnnnnnnnnnnnnnnnnnnnnnnnnnnnnnnnnnnnnnnnnnnnnnnnnnnnnnnnnnnnnnnnnnnnnnnnnnnnnnnnnnnnnnnnnnnnnnnnnnnnnnnnnnnnnnnnnnnnnnnnnnnnnnnnnnnnnnnnnnnnnnnnnnnnnnnnnnnnnnnnnnnnnnnnnnnnnnnnnnnnnnnnnnnnnnnnnnnnnnnnnnnnnnnnnnnnnnnnnnnnnnnnnnnnnnnnnnnnnnnnnnnnnnnnnnnnnnnnnnnnnnnnnnnnnnnnnnnnnnnnnnnnnnnnnnnnnnnnnnnnnnnnnnnnnnnnnnnnnnnnnnnnnnnnnnnnnnnnnnnnnnnnnnnnnnnnnnnnnnnnnnnnnnnnnnnnnnnnnnnnnnnnnnnnnnnnnnnnnnnnnnnnnnnnnnnnnnnnnnnnnnnnnnnnnnnnnnnnnnnnnnnnnnnnnnnnnnnnnnnnnnnnnnnnnnnnnnnnnnnnnnnnnnnnnnnnnnnnnnnnnnnnnnnnnnnnnnnnnnnnnnnnnnnnnnnnnnnnnnnnnnnnnnnnnnnnnnnnnnnnnnnnnnnnnnnnnnnnnnnnnnnnnnnnnnnnnnnnnnnnnnnnnnnnnnnnnnnnnnnnnnnnnnnnnnnnnnnnnnnnnnnnnnnnnnnnnnnnnnnnnnnnnnnnnnnnnnnnnnnnnnnnnnnnnnnnnnnnnnnnnnnnnnnnnnnnnnnnnnnnnnnnnnnnnnnnnnnnnnnnnnnnnnnnnnnnnnnnnnnnnnnnnnnnnnnnnnnnnnnnnnnnnnnnnnnnnnnnnnnnnnnnnnnnnnnnnnnnnnnnnnnnnnnnnnnnnnnnnnnnnnnnnnnnnnnnnnnnnnnnnnnnnnnnnnnnnnnnnnnnnnnnnnnnnnnnnnnnnnnnnnnnnnnnnnnnnnnnnnnnnnnnnnnnnnnnnnnnnnnnnnnnnnnnnnnnnnnnnnnnnnnnnnnnnnnnnnnnnnnnnnnnnnnnnnnnnnnnnnnnnnnnnnnnnnnnnnnnnnnnnnnnnnnnnnnnnnnnnnnnnnnnnnnnnnnnnnnnnnnnnnnnnnnnnnnnnnnnnnnnnnnnnnnnnnnnnnnnnnnnnnnnnnnnnnnnnnnnnnnnnnnnnnnnnnnnnnnnnnnnnnnnnnnnnnnnnnnnnnnnnnnnnnnnnnnnnnnnnnnnnnnnnnnnnnnnnnnnnnnnnnnnnnnnnnnnnnnnnnnnnnnnnnnnnnnnnnnnnnnnnnnnnnnnnnnnnnnnnnnnnnnnnnnnnnnnnnnnnnnnnnnnnnnnnnnnnnnnnnnnnnnnnnnnnnnnnnnnnnnnnnnnnnnnnnnnnnnnnnnnnnnnnnnnnnnnnnnnnnnnnnnnnnnnnnnnnnnnnnnnnnnnnnnnnnnnnnnnnnnnnnnnnnnnnnnnnnnnnnnnnnnnnnnnnnnnnnnnnnnnnnnnnnnnnnnnnnnnnnnnnnnnnnnnnnnnnnnnnnnnnnnnnnnnnnnnnnnnnnnnnnnnnnnnnnnnnnnnnnnnnnnnnnnnnnnnnnnnnnnnnnnnnnnnnnnnnnnnnnnnnnnnnnnnnnnnnnnnnnnnnnnnnnnnnnnnnnnnnnnnnnnnnnnnnnnnnnnnnnnnnnnnnnnnnnnnnnnnnnnnnnnnnnnnnnnnnnnnnnnnnnnnnnnnnnnnnnnnnnnnnnnnnnnnnnnnnnnnnnnnnnnnnnnnnnnnnnnnnnnnnnnnnnnnnnnnnnnnnnnnnnnnnnnnnnnnnnnnnnnnnnnnnnnnnnnnnnnnnnnnnnnnnnnnnnnnnnnnnnnnnnnnnnnnnnnnnnnnnnnnnnnnnnnnnnnnnnnnnnnnnnnnnnnnnnnnnnnnnnnnnnnnnnnnnnnnnnnnnnnnnnnnnnnnnnnnnnnnnnnnnnnnnnnnnnnnnnnnnnnnnnnnnnnnnnnnnnnnnnnnnnnnnnnnnnnnnnnnnnnnnnnnnnnnnnnnnnnnnnnnnnnnnnnnnnnnnnnnnnnnnnnnnnnnnnnnnnnnnnnnnnnnnnnnnnnnnnnnnnnnnnnnnnnnnnnnnnnnnnnnnnnnnnnnnnnnnnnnnnnnnnnnnnnnnnnnnnnnnnnnnnnnnnnnnnnnnnnnnnnnnnnnnnnnnnnnnnnnnnnnnnnnnnnnnnnnnnnnnnnnnnnnnnnnnnnnnnnnnnnnnnnnnnnnnnnnnnnnnnnnnnnnnnnnnnnnnnnnnnnnnnnnnnnnnnnnnnnnnnnnnnnnnnnnnnnnnnnnnnnnnnnnnnnnnnnnnnnnnnnnnnnnnnnnnnnnnnnnnnnnnnnnnnnnnnnnnnnnnnnnnnnnnnnnnnnnnnnnnnnnnnnnnnnnnnnnnnnnnnnnnnnnnnnnnnnnnnnnnnnnnnnnnnnnnnnnnnnnnnnnnnnnnnnnnnnnnnnnnnnnnnnnnnnnnnnnnnnnnnnnnnnnnnnnnnnnnnnnnnnnnnnnnnnnnnnnnnnnnnnnnnnnnnnnnnnnnnnnnnnnnnnnnnnnnnnnnnnnnnnnnnnnnnnnnnnnnnnnnnnnnnnnnnnnnnnnnnnnnnnnnnnnnnnnnnnnnnnnnnnnnnnnnnnnnnnnnnnnnnnnnnnnnnnnnnnnnnnnnnnnnnnnnnnnnnnnnnnnnnnnnnnnnnnnnnnnnnnnnnnnnnnnnnnnnnnnnnnnnnnnnnnnnnnnnnnnnnnnnnnnnnnnnnnnnnnnnnnnnnnnnnnnnnnnnnnnnnnnnnnnnnnnnnnnnnnnnnnnnnnnnnnnnnnnnnnnnnnnnnnnnnnnnnnnnnnnnnnnnnnnnnnnnnnnnnnnnnnnnnnnnnnnnnnnnnnnnnnnnnnnnnnnnnnnnnnnnnnnnnnnnnnnnnnnnnnnnnnnnnnnnnnnnnnnnnnnnnnnnnnnnnnnnnnnnnnnnnnnnnnnnnnnnnnnnnnnnnnnnnnnnnnnnnnnnnnnnnnnnnnnnnnnnnnnnnnnnnnnnnnnnnnnnnnnnnnnnnnnnnnnnnnnnnnnnnnnnnnnnnnnnnnnnnnnnnnnnnnnnnnnnnnnnnnnnnnnnnnnnnnnnnnnnnnnnnnnnnnnnnnnnnnnnnnnnnnnnnnnnnnnnnnnnnnnnnnnnnnnnnnnnnnnnnnnnnnnnnnnnnnnnnnnnnnnnnnnnnnnnnnnnnnnnnnnnnnnnnnnnnnnnnnnnnnnnnnnnnnnnnnnnnnnnnnnnnnnnnnnnnnnnnnnnnnnnnnnnnnnnnnnnnnnnnnnnnnnnnnnnnnnnnnnnnnnnnnnnnnnnnnnnnnnnnnnnnnnnnnnnnnnnnnnnnnnnnnnnnnnnnnnnnnnnnnnnnnnnnnnnnnnnnnnnnnnnnnnnnnnnnnnnnnnnnnnnnnnnnnnnnnnnnnnnnnnnnnnnnnnnnnnnnnnnnnnnnnnnnnnnnnnnnnnnnnnnnnnnnnnnnnnnnnnnnnnnnnnnnnnnnnnnnnnnnnnnnnnnnnnnnnnnnnnnnnnnnnnnnnnnnnnnnnnnnnnnnnnnnnnnnnnnnnnnnnnnnnnnnnnnnnnnnnnnnnnnnnnnnnnnnnnnnnnnnnnnnnnnnnnnnnnnnnnnnnnnnnnnnnnnnnnnnnnnnnnnnnnnnnnnnnnnnnnnnnnnnnnnnnnnnnnnnnnnnnnnnnnnnnnnnnnnnnnnnnnnnnnnnnnnnnnnnnnnnnnnnnnnnnnnnnnnnnnnnnnnnnnnnnnnnnnnnnnnnnnnnnnnnnnnnnnnnnnnnnnnnnnnnnnnnnnnnnnnnnnnnnnnnnnnnnnnnnnnnnnnnnnnnnnnnnnnnnnnnnnnnnnnnnnnnnnnnnnnnnnnnnnnnnnnnnnnnnnnnnnnnnnnnnnnnnnnnnnnnnnnnnnnnnnnnnnnnnnnnnnnnnnnnnnnnnnnnnnnnnnnnnnnnnnnnnnnnnnnnnnnnnnnnnnnnnnnnnnnnnnnnnnnnnnnnnnnnnnnnnnnnnnnnnnnnnnnnnnnnnnnnnnnnnnnnnnnnnnnnnnnnnnnnnnnnnnnnnnnnnnnnnnnnnnnnnnnnnnnnnnnnnnnnnnnnnnnnnnnnnnnnnnnnnnnnnnnnnnnnnnnnnnnnnnnnnnnnnnnnnnnnnnnnnnnnnnnnnnnnnnnnnnnnnnnnnnnnnnnnnnnnnnnnnnnnnnnnnnnnnnnnnnnnnnnnnnnnnnnnnnnnnnnnnnnnnnnnnnnnnnnnnnnnnnnnnnnnnnnnnnnnnnnnnnnnnnnnnnnnnnnnnnnnnnnnnnnnnnnnnnnnnnnnnnnnnnnnnnnnnnnnnnnnnnnnnnnnnnnnnnnnnnnnnnnnnnnnnnnnnnnnnnnnnnnnnnnnnnnnnnnnnnnnnnnnnnnnnnnnnnnnnnnnnnnnnnnnnnnnnnnnnnnnnnnnnnnnnnnnnnnnnnnnnnnnnnnnnnnnnnnnnnnnnnnnnnnnnnnnnnnnnnnnnnnnnnnnnnnnnnnnnnnnnnnnnnnnnnnnnnnnnnnnnnnnnnnnnnnnnnnnnnnnnnnnnnnnnnnnnnnnnnnnnnnnnnnnnnnnnnnnnnnnnnnnnnnnnnnnnnnnnnnnnnnnnnnnnnnnnnnnnnnnnnnnnnnnnnnnnnnnnnnnnnnnnnnnnnnnnnnnnnnnnnnnnnnnnnnnnnnnnnnnnnnnnnnnnnnnnnnnnnnnnnnnnnnnnnnnnnnnnnnnnnnnnnnnnnnnnnnnnnnnnnnnnnnnnnnnnnnnnnnnnnnnnnnnnnnnnnnnnnnnnnnnnnnnnnnnnnnnnnnnnnnnnnnnnnnnnnnnnnnnnnnnnnnnnnnnnnnnnnnnnnnnnnnnnnnnnnnnnnnnnnnnnnnnnnnnnnnnnnnnnnnnnnnnnnnnnnnnnnnnnnnnnnnnnnnnnnnnnnnnnnnnnnnnnnnnnnnnnnnnnnnnnnnnnnnnnnnnnnnnnnnnnnnnnnnnnnnnnnnnnnnnnnnnnnnnnnnnnnnnnnnnnnnnnnnnnnnnnnnnnnnnnnnnnnnnnnnnnnnnnnnnnnnnnnnnnnnnnnnnnnnnnnnnnnnnnnnnnnnnnnnnnnnnnnnnnnnnnnnnnnnnnnnnnnnnnnnnnnnnnnnnnnnnnnnnnnnnnnnnnnnnnnnnnnnnnnnnnnnnnnnnnnnnnnnnnnnnnnnnnnnnnnnnnnnnnnnnnnnnnnnnnnnnnnnnnnnnnnnnnnnnnnnnnnnnnnnnnnnnnnnnnnnnnnnnnnnnnnnnnnnnnnnnnnnnnnnnnnnnnnnnnnnnnnnnnnnnnnnnnnnnnnnnnnnnnnnnnnnnnnnnnnnnnnnnnnnnnnnnnnnnnnnnnnnnnnnnnnnnnnnnnnnnnnnnnnnnnnnnnnnnnnnnnnnnnnnnnnnnnnnnnnnnnnnnnnnnnnnnnnnnnnnnnnnnnnnnnnnnnnnnnnnnnnnnnnnnnnnnnnnnnnnnnnnnnnnnnnnnnnnnnnnnnnnnnnnnnnnnnnnnnnnnnnnnnnnnnnnnnnnnnnnnnnnnnnnnnnnnnnnnnnnnnnnnnnnnnnnnnnnnnnnnnnnnnnnnnnnnnnnnnnnnnnnnnnnnnnnnnnnnnnnnnnnnnnnnnnnnnnnnnnnnnnnnnnnnnnnnnnnnnnnnnnnnnnnnnnnnnnnnnnnnnnnnnnnnnnnnnnnnnnnnnnnnnnnnnnnnnnnnnnnnnnnnnnnnnnnnnnnnnnnnnnnnnnnnnnnnnnnnnnnnnnnnnnnnnnnnnnnnnnnnnnnnnnnnnnnnnnnnnnnnnnnnnnnnnnnnnnnnnnnnnnnnnnnnnnnnnnnnnnnnnnnnnnnnnnnnnnnnnnnnnnnnnnnnnnnnnnnnnnnnnnnnnnnnnnnnnnnnnnnnnnnnnnnnnnnnnnnnnnnnnnnnnnnnnnnnnnnnnnnnnnnnnnnnnnnnnnnnnnnnnnnnnnnnnnnnnnnnnnnnnnnnnnnnnnnnnnnnnnnnnnnnnnnnnnnnnnnnnnnnnnnnnnnnnnnnnnnnnnnnnnnnnnnnnnnnnnnnnnnnnnnnnnnnnnnnnnnnnnnnnnnnnnnnnnnnnnnnnnnnnnnnnnnnnnnnnnnnnnnnnnnnnnnnnnnnnnnnnnnnnnnnnnnnnnnnnnnnnnnnnnnnnnnnnnnnnnnnnnnnnnnnnnnnnnnnnnnnnnnnnnnnnnnnnnnnnnnnnnnnnnnnnnnnnnnnnnnnnnnnnnnnnnnnnnnnnnnnnnnnnnnnnnnnnnnnnnnnnnnnnnnnnnnnnnnnnnnnnnnnnnnnnnnnnnnnnnnnnnnnnnnnnnnnnnnnnnnnnnnnnnnnnnnnnnnnnnnnnnnnnnnnnnnnnnnnnnnnnnnnnnnnnnnnnnnnnnnnnnnnnnnnnnnnnnnnnnnnnnnnnnnnnnnnnnnnnnnnnnnnnnnnnnnnnnnnnnnnnnnnnnnnnnnnnnnnnnnnnnnnnnnnnnnnnnnnnnnnnnnnnnnnnnnnnnnnnnnnnnnnnnnnnnnnnnnnnnnnnnnnnnnnnnnnnnnnnnnnnnnnnnnnnnnnnnnnnnnnnnnnnnnnnnnnnnnnnnnnnnnnnnnnnnnnnnnnnnnnnnnnnnnnnnnnnnnnnnnnnnnnnnnnnnnnnnnnnnnnnnnnnnnnnnnnnnnnnnnnnnnnnnnnnnnnnnnnnnnnnnnnnnnnnnnnnnnnnnnnnnnnnnnnnnnnnnnnnnnnnnnnnnnnnnnnnnnnnnnnnnnnnnnnnnnnnnnnnnnnnnnnnnnnnnnnnnnnnnnnnnnnnnnnnnnnnnnnnnnnnnnnnnnnnnnnnnnnnnnnnnnnnnnnnnnnnnnnnnnnnnnnnnnnnnnnnnnnnnnnnnnnnnnnnnnnnnnnnnnnnnnnnnnnnnnnnnnnnnnnnnnnnnnnnnnnnnnnnnnnnnnnnnnnnnnnnnnnnnnnnnnnnnnnnnnnnnnnnnnnnnnnnnnnnnnnnnnnnnnnnnnnnnnnnnnnnnnnnnnnnnnnnnnnnnnnnnnnnnnnnnnnnnnnnnnnnnnnnnnnnnnnnnnnnnnnnnnnnnnnnnnnnnnnnnnnnnnnnnnnnnnnnnnnnnnnnnnnnnnnnnnnnnnnnnnnnnnnnnnnnnnnnnnnnnnnnnnnnnnnnnnnnnnnnnnnnnnnnnnnnnnnnnnnnnnnnnnnnnnnnnnnnnnnnnnnnnnnnnnnnnnnnnnnnnnnnnnnnnnnnnnnnnnnnnnnnnnnnnnnnnnnnnnnnnnnnnnnnnnnnnnnnnnnnnnnnnnnnnnnnnnnnnnnnnnnnnnnnnnnnnnnnnnnnnnnnnnnnnnnnnnnnnnnnnnnnnnnnnnnnnnnnnnnnnnnnnnnnnnnnnnnnnnnnnnnnnnnnnnnnnnnnnnnnnnnnnnnnnnnnnnnnnnnnnnnnnnnnnnnnnnnnnnnnnnnnnnnnnnnnnnnnnnnnnnnnnnnnnnnnnnnnnnnnnnnnnnnnnnnnnnnnnnnnnnnnnnnnnnnnnnnnnnnnnnnnnnnnnnnnnnnnnnnnnnnnnnnnnnnnnnnnnnnnnnnnnnnnnnnnnnnnnnnnnnnnnnnnnnnnnnnnnnnnnnnnnnnnnnnnnnnnnnnnnnnnnnnnnnnnnnnnnnnnnnnnnnnnnnnnnnnnnnnnnnnnnnnnnnnnnnnnnnnnnnnnnnnnnnnnnnnnnnnnnnnnnnnnnnnnnnnnnnnnnnnnnnnnnnnnnnnnnnnnnnnnnnnnnnnnnnnnnnnnnnnnnnnnnnnnnnnnnnnnnnnnnnnnnnnnnnnnnnnnnnnnnnnnnnnnnnnnnnnnnnnnnnnnnnnnnnnnnnnnnnnnnnnnnnnnnnnnnnnnnnnnnnnnnnnnnnnnnnnnnnnnnnnnnnnnnnnnnnnnnnnnnnnnnnnnnnnnnnnnnnnnnnnnnnnnnnnnnnnnnnnnnnnnnnnnnnnnnnnnnnnnnnnnnnnnnnnnnnnnnnnnnnnnnnnnnnnnnnnnnnnnnnnnnnnnnnnnnnnnnnnnnnnnnnnnnnnnnnnnnnnnnnnnnnnnnnnnnnnnnnnnnnnnnnnnnnnnnnnnnnnnnnnnnnnnnnnnnnnnnnnnnnnnnnnnnnnnnnnnnnnnnnnnnnnnnnnnnnnnnnnnnnnnnnnnnnnnnnnnnnnnnnnnnnnnnnnnnnnnnnnnnnnnnnnnnnnnnnnnnnnnnnnnnnnnnnnnnnnnnnnnnnnnnnnnnnnnnnnnnnnnnnnnnnnnnnnnnnnnnnnnnnnnnnnnnnnnnnnnnnnnnnnnnnnnnnnnnnnnnnnnnnnnnnnnnnnnnnnnnnnnnnnnnnnnnnnnnnnnnnnnnnnnnnnnnnnnnnnnnnnnnnnnnnnnnnnnnnnnnnnnnnnnnnnnnnnnnnnnnnnnnnnnnnnnnnnnnnnnnnnnnnnnnnnnnnnnnnnnnnnnnnnnnnnnnnnnnnnnnnnnnnnnnnnnnnnnnnnnnnnnnnnnnnnnnnnnnnnnnnnnnnnnnnnnnnnnnnnnnnnnnnnnnnnnnnnnnnnnnnnnnnnnnnnnnnnnnnnnnnnnnnnnnnnnnnnnnnnnnnnnnnnnnnnnnnnnnnnnnnnnnnnnnnnnnnnnnnnnnnnnnnnnnnnnnnnnnnnnnnnnnnnnnnnnnnnnnnnnnnnnnnnnnnnnnnnnnnnnnnnnnnnnnnnnnnnnnnnnnnnnnnnnnnnnnnnnnnnnnnnnnnnnnnnnnnnnnnnnnnnnnnnnnnnnnnnnnnnnnnnnnnnnnnnnnnnnnnnnnnnnnnnnnnnnnnnnnnnnnnnnnnnnnnnnnnnnnnnnnnnnnnnnnnnnnnnnnnnnnnnnnnnnnnnnnnnnnnnnnnnnnnnnnnnnnnnnnnnnnnnnnnnnnnnnnnnnnnnnnnnnnnnnnnnnnnnnnnnnnnnnnnnnnnnnnnnnnnnnnnnnnnnnnnnnnnnnnnnnnnnnnnnnnnnnnnnnnnnnnnnnnnnnnnnnnnnnnnnnnnnnnnnnnnnnnnnnnnnnnnnnnnnnnnnnnnnnnnnnnnnnnnnnnnnnnnnnnnnnnnnnnnnnnnnnnnnnnnnnnnnnnnnnnnnnnnnnnnnnnnnnnnnnnnnnnnnnnnnnnnnnnnnnnnnnnnnnnnnnnnnnnnnnnnnnnnnnnnnnnnnnnnnnnnnnnnnnnnnnnnnnnnnnnnnnnnnnnnnnnnnnnnnnnnnnnnnnnnnnnnnnnnnnnnnnnnnnnnnnnnnnnnnnnnnnnnnnnnnnnnnnnnnnnnnnnnnnnnnnnnnnnnnnnnnnnnnnnnnnnnnnnnnnnnnnnnnnnnnnnnnnnnnnnnnnnnnnnnnnnnnnnnnnnnnnnnnnnnnnnnnnnnnnnnnnnnnnnnnnnnnnnnnnnnnnnnnnnnnnnnnnnnnnnnnnnnnnnnnnnnnnnnnnnnnnnnnnnnnnnnnnnnnnnnnnnnnnnnnnnnnnnnnnnnnnnnnnnnnnnnnnnnnnnnnnnnnnnnnnnnnnnnnnnnnnnnnnnnnnnnnnnnnnnnnnnnnnnnnnnnnnnnnnnnnnnnnnnnnnnnnnnnnnnnnnnnnnnnnnnnnnnnnnnnnnnnnnnnnnnnnnnnnnnnnnnnnnnnnnnnnnnnnnnnnnnnnnnnnnnnnnnnnnnnnnnnnnnnnnnnnnnnnnnnnnnnnnnnnnnnnnnnnnnnnnnnnnnnnnnnnnnnnnnnnnnnnnnnnnnnnnnnnnnnnnnnnnnnnnnnnnnnnnnnnnnnnnnnnnnnnnnnnnnnnnnnnnnnnnnnnnnnnnnnnnnnnnnnnnnnnnnnnnnnnnnnnnnnnnnnnnnnnnnnnnnnnnnnnnnnnnnnnnnnnnnnnnnnnnnnnnnnnnnnnnnnnnnnnnnnnnnnnnnnnnnnnnnnnnnnnnnnnnnnnnnnnnnnnnnnnnnnnnnnnnnnnnnnnnnnnnnnnnnnnnnnnnnnnnnnnnnnnnnnnnnnnnnnnnnnnnnnnnnnnnnnnnnnnnnnnnnnnnnnnnnnnnnnnnnnnnnnnnnnnnnnnnnnnnnnnnnnnnnnnnnnnnnnnnnnnnnnnnnnnnnnnnnnnnnnnnnnnnnnnnnnnnnnnnnnnnnnnnnnnnnnnnnnnnnnnnnnnnnnnnnnnnnnnnnnnnnnnnnnnnnnnnnnnnnnnnnnnnnnnnnnnnnnnnnnnnnnnnnnnnnnnnnnnnnnnnnnnnnnnnnnnnnnnnnnnnnnnnnnnnnnnnnnnnnnnnnnnnnnnnnnnnnnnnnnnnnnnnnnnnnnnnnnnnnnnnnnnnnnnnnnnnnnnnnnnnnnnnnnnnnnnnnnnnnnnnnnnnnnnnnnnnnnnnnnnnnnnnnnnnnnnnnnnnnnnnnnnnnnnnnnnnnnnnnnnnnnnnnnnnnnnnnnnnnnnnnnnnnnnnnnnnnnnnnnnnnnnnnnnnnnnnnnnnnnnnnnnnnnnnnnnnnnnnnnnnnnnnnnnnnnnnnnnnnnnnnnnnnnnnnnnnnnnnnnnnnnnnnnnnnnnnnnnnnnnnnnnnnnnnnnnnnnnnnnnnnnnnnnnnnnnnnnnnnnnnnnnnnnnnnnnnnnnnnnnnnnnnnnnnnnnnnnnnnnnnnnnnnnnnnnnnnnnnnnnnnnnnnnnnnnnnnnnnnnnnnnnnnnnnnnnnnnnnnnnnnnnnnnnnnnnnnnnnnnnnnnnnnnnnnnnnnnnnnnnnnnnnnnnnnnnnnnnnnnnnnnnnnnnnnnnnnnnnnnnnnnnnnnnnnnnnnnnnnnnnnnnnnnnnnnnnnnnnnnnnnnnnnnnnnnnnnnnnnnnnnnnnnnnnnnnnnnnnnnnnnnnnnnnnnnnnnnnnnnnnnnnnnnnnnnnnnnnnnnnnnnnnnnnnnnnnnnnnnnnnnnnnnnnnnnnnnnnnnnnnnnnnnnnnnnnnnnnnnnnnnnnnnnnnnnnnnnnnnnnnnnnnnnnnnnnnnnnnnnnnnnnnnnnnnnnnnnnnnnnnnnnnnnnnnnnnnnnnnnnnnnnnnnnnnnnnnnnnnnnnnnnnnnnnnnnnnnnnnnnnnnnnnnnnnnnnnnnnnnnnnnnnnnnnnnnnnnnnnnnnnnnnnnnnnnnnnnnnnnnnnnnnnnnnnnnnnnnnnnnnnnnnnnnnnnnnnnnnnnnnnnnnnnnnnnnnnnnnnnnnnnnnnnnnnnnnnnnnnnnnnnnnnnnnnnnnnnnnnnnnnnnnnnnnnnnnnnnnnnnnnnnnnnnnnnnnnnnnnnnnnnnnnnnnnnnnnnnnnnnnnnnnnnnnnnnnnnnnnnnnnnnnnnnnnnnnnnnnnnnnnnnnnnnnnnnnnnnnnnnnnnnnnnnnnnnnnnnnnnnnnnnnnnnnnnnnnnnnnnnnnnnnnnnnnnnnnnnnnnnnnnnnnnnnnnnnnnnnnnnnnnnnnnnnnnnnnnnnnnnnnnnnnnnnnnnnnnnnnnnnnnnnnnnnnnnnnnnnnnnnnnnnnnnnnnnnnnnnnnnnnnnnnnnnnnnnnnnnnnnnnnnnnnnnnnnnnnnnnnnnnnnnnnnnnnnnnnnnnnnnnnnnnnnnnnnnnnnnnnnnnnnnnnnnnnnnnnnnnnnnnnnnnnnnnnnnnnnnnnnnnnnnnnnnnnnnnnnnnnnnnnnnnnnnnnnnnnnnnnnnnnnnnnnnnnnnnnnnnnnnnnnnnnnnnnnnnnnnnnnnnnnnnnnnnnnnnnnnnnnnnnnnnnnnnnnnnnnnnnnnnnnnnnnnnnnnnnnnnnnnnnnnnnnnnnnnnnnnnnnnnnnnnnnnnnnnnnnnnnnnnnnnnnnnnnnnnnnnnnnnnnnnnnnnnnnnnnnnnnnnnnnnnnnnnnnnnnnnnnnnnnnnnnnnnnnnnnnnnnnnnnnnnnnnnnnnnnnnnnnnnnnnnnnnnnnnnnnnnnnnnnnnnnnnnnnnnnnnnnnnnnnnnnnnnnnnnnnnnnnnnnnnnnnnnnnnnnnnnnnnnnnnnnnnnnnnnnnnnnnnnnnnnnnnnnnnnnnnnnnnnnnnnnnnnnnnnnnnnnnnnnnnnnnnnnnnnnnnnnnnnnnnnnnnnnnnnnnnnnnnnnnnnnnnnnnnnnnnnnnnnnnnnnnnnnnnnnnnnnnnnnnnnnnnnnnnnnnnnnnnnnnnnnnnnnnnnnnnnnnnnnnnnnnnnnnnnnnnnnnnnnnnnnnnnnnnnnnnnnnnnnnnnnnnnnnnnnnnnnnnnnnnnnnnnnnnnnnnnnnnnnnnnnnnnnnnnnnnnnnnnnnnnnnnnnnnnnnnnnnnnnnnnnnnnnnnnnnnnnnnnnnnnnnnnnnnnnnnnnnnnnnnnnnnnnnnnnnnnnnnnnnnnnnnnnnnnnnnnnnnnnnnnnnnnnnnnnnnnnnnnnnnnnnnnnnnnnnnnnnnnnnnnnnnnnnnnnnnnnnnnnnnnnnnnnnnnnnnnnnnnnnnnnnnnnnnnnnnnnnnnnnnnnnnnnnnnnnnnnnnnnnnnnnnnnnnnnnnnnnnnnnnnnnnnnnnnnnnnnnnnnnnnnnnnnnnnnnnnnnnnnnnnnnnnnnnnnnnnnnnnnnnnnnnnnnnnnnnnnnnnnnnnnnnnnnnnnnnnnnnnnnnnnnnnnnnnnnnnnnnnnnnnnnnnnnnnnnnnnnnnnnnnnnnnnnnnnnnnnnnnnnnnnnnnnnnnnnnnnnnnnnnnnnnnnnnnnnnnnnnnnnnnnnnnnnnnnnnnnnnnnnnnnnnnnnnnnnnnnnnnnnnnnnnnnnnnnnnnnnnnnnnnnnnnnnnnnnnnnnnnnnnnnnnnnnnnnnnnnnnnnnnnnnnnnnnnnnnnnnnnnnnnnnnnnnnnnnnnnnnnnnnnnnnnnnnnnnnnnnnnnnnnnnnnnnnnnnnnnnnnnnnnnnnnnnnnnnnnnnnnnnnnnnnnnnnnnnnnnnnnnnnnnnnnnnnnnnnnnnnnnnnnnnnnnnnnnnnnnnnnnnnnnnnnnnnnnnnnnnnnnnnnnnnnnnnnnnnnnnnnnnnnnnnnnnnnnnnnnnnnnnnnnnnnnnnnnnnnnnnnnnnnnnnnnnnnnnnnnnnnnnnnnnnnnnnnnnnnnnnnnnnnnnnnnnnnnnnnnnnnnnnnnnnnnnnnnnnnnnnnnnnnnnnnnnnnnnnnnnnnnnnnnnnnnnnnnnnnnnnnnnnnnnnnnnnnnnnnnnnnnnnnnnnnnnnnnnnnnnnnnnnnnnnnnnnnnnnnnnnnnnnnnnnnnnnnnnnnnnnnnnnnnnnnnnnnnnnnnnnnnnnnnnnnnnnnnnnnnnnnnnnnnnnnnnnnnnnnnnnnnnnnnnnnnnnnnnnnnnnnnnnnnnnnnnnnnnnnnnnnnnnnnnnnnnnnnnnnnnnnnnnnnnnnnnnnnnnnnnnnnnnnnnnnnnnnnnnnnnnnnnnnnnnnnnnnnnnnnnnnnnnnnnnnnnnnnnnnnnnnnnnnnnnnnnnnnnnnnnnnnnnnnnnnnnnnnnnnnnnnnnnnnnnnnnnnnnnnnnnnnnnnnnnnnnnnnnnnnnnnnnnnnnnnnnnnnnnnnnnnnnnnnnnnnnnnnnnnnnnnnnnnnnnnnnnnnnnnnnnnnnnnnnnnnnnnnnnnnnnnnnnnnnnnnnnnnnnnnnnnnnnnnnnnnnnnnnnnnnnnnnnnnnnnnnnnnnnnnnnnnnnnnnnnnnnnnnnnnnnnnnnnnnnnnnnnnnnnnnnnnnnnnnnnnnnnnnnnnnnnnnnnnnnnnnnnnnnnnnnnnnnnnnnnnnnnnnnnnnnnnnnnnnnnnnnnnnnnnnnnnnnnnnnnnnnnnnnnnnnnnnnnnnnnnnnnnnnnnnnnnnnnnnnnnnnnnnnnnnnnnnnnnnnnnnnnnnnnnnnnnnnnnnnnnnnnnnnnnnnnnnnnnnnnnnnnnnnnnnnnnnnnnnnnnnnnnnnnnnnnnnnnnnnnnnnnnnnnnnnnnnnnnnnnnnnnnnnnnnnnnnnnnnnnnnnnnnnnnnnnnnnnnnnnnnnnnnnnnnnnnnnnnnnnnnnnnnnnnnnnnnnnnnnnnnnnnnnnnnnnnnnnnnnnnnnnnnnnnnnnnnnnnnnnnnnnnnnnnnnnnnnnnnnnnnnnnnnnnnnnnnnnnnnnnnnnnnnnnnnnnnnnnnnnnnnnnnnnnnnnnnnnnnnnnnnnnnnnnnnnnnnnnnnnnnnnnnnnnnnnnnnnnnnnnnnnnnnnnnnnnnnnnnnnnnnnnnnnnnnnnnnnnnnnnnnnnnnnnnnnnnnnnnnnnnnnnnnnnnnnnnnnnnnnnnnnnnnnnnnnnnnnnnnnnnnnnnnnnnnnnnnnnnnnnnnnnnnnnnnnnnnnnnnnnnnnnnnnnnnnnnnnnnnnnnnnnnnnnnnnnnnnnnnnnnnnnnnnnnnnnnnnnnnnnnnnnnnnnnnnnnnnnnnnnnnnnnnnnnnnnnnnnnnnnnnnnnnnnnnnnnnnnnnnnnnnnnnnnnnnnnnnnnnnnnnnnnnnnnnnnnnnnnnnnnnnnnnnnnnnnnnnnnnnnnnnnnnnnnnnnnnnnnnnnnnnnnnnnnnnnnnnnnnnnnnnnnnnnnnnnnnnnnnnnnnnnnnnnnnnnnnnnnnnnnnnnnnnnnnnnnnnnnnnnnnnnnnnnnnnnnnnnnnnnnnnnnnnnnnnnnnnnnnnnnnnnnnnnnnnnnnnnnnnnnnnnnnnnnnnnnnnnnnnnnnnnnnnnnnnnnnnnnnnnnnnnnnnnnnnnnnnnnnnnnnnnnnnnnnnnnnnnnnnnnnnnnnnnnnnnnnnnnnnnnnnnnnnnnnnnnnnnnnnnnnnnnnnnnnnnnnnnnnnnnnnnnnnnnnnnnnnnnnnnnnnnnnnnnnnnnnnnnnnnnnnnnnnnnnnnnnnnnnnnnnnnnnnnnnnnnnnnnnnnnnnnnnnnnnnnnnnnnnnnnnnnnnnnnnnnnnnnnnnnnnnnnnnnnnnnnnnnnnnnnnnnnnnnnnnnnnnnnnnnnnnnnnnnnnnnnnnnnnnnnnnnnnnnnnnnnnnnnnnnnnnnnnnnnnnnnnnnnnnnnnnnnnnnnnnnnnnnnnnnnnnnnnnnnnnnnnnnnnnnnnnnnnnnnnnnnnnnnnnnnnnnnnnnnnnnnnnnnnnnnnnnnnnnnnnnnnnnnnnnnnnnnnnnnnnnnnnnnnnnnnnnnnnnnnnnnnnnnnnnnnnnnnnnnnnnnnnnnnnnnnnnnnnnnnnnnnnnnnnnnnnnnnnnnnnnnnnnnnnnnnnnnnnnnnnnnnnnnnnnnnnnnnnnnnnnnnnnnnnnnnnnnnnnnnnnnnnnnnnnnnnnnnnnnnnnnnnnnnnnnnnnnnnnnnnnnnnnnnnnnnnnnnnnnnnnnnnnnnnnnnnnnnnnnnnnnnnnnnnnnnnnnnnnnnnnnnnnnnnnnnnnnnnnnnnnnnnnnnnnnnnnnnnnnnnnnnnnnnnnnnnnnnnnnnnnnnnnnnnnnnnnnnnnnnnnnnnnnnnnnnnnnnnnnnnnnnnnnnnnnnnnnnnnnnnnnnnnnnnnnnnnnnnnnnnnnnnnnnnnnnnnnnnnnnnnnnnnnnnnnnnnnnnnnnnnnnnnnnnnnnnnnnnnnnnnnnnnnnnnnnnnnnnnnnnnnnnnnnnnnnnnnnnnnnnnnnnnnnnnnnnnnnnnnnnnnnnnnnnnnnnnnnnnnnnnnnnnnnnnnnnnnnnnnnnnnnnnnnnnnnnnnnnnnnnnnnnnnnnnnnnnnnnnnnnnnnnnnnnnnnnnnnnnnnnnnnnnnnnnnnnnnnnnnnnnnnnnnnnnnnnnnnnnnnnnnnnnnnnnnnnnnnnnnnnnnnnnnnnnnnnnnnnnnnnnnnnnnnnnnnnnnnnnnnnnnnnnnnnnnnnnnnnnnnnnnnnnnnnnnnnnnnnnnnnnnnnnnnnnnnnnnnnnnnnnnnnnnnnnnnnnnnnnnnnnnnnnnnnnnnnnnnnnnnnnnnnnnnnnnnnnnnnnnnnnnnnnnnnnnnnnnnnnnnnnnnnnnnnnnnnnnnnnnnnnnnnnnnnnnnnnnnnnnnnnnnnnnnnnnnnnnnnnnnnnnnnnnnnnnnnnnnnnnnnnnnnnnnnnnnnnnnnnnnnnnnnnnnnnnnnnnnnnnnnnnnnnnnnnnnnnnnnnnnnnnnnnnnnnnnnnnnnnnnnnnnnnnnnnnnnnnnnnnnnnnnnnnnnnnnnnnnnnnnnnnnnnnnnnnnnnnnnnnnnnnnnnnnnnnnnnnnnnnnnnnnnnnnnnnnnnnnnnnnnnnnnnnnnnnnnnnnnnnnnnnnnnnnnnnnnnnnnnnnnnnnnnnnnnnnnnnnnnnnnnnnnnnnnnnnnnnnnnnnnnnnnnnnnnnnnnnnnnnnnnnnnnnnnnnnnnnnnnnnnnnnnnnnnnnnnnnnnnnnnnnnnnnnnnnnnnnnnnnnnnnnnnnnnnnnnnnnnnnnnnnnnnnnnnnnnnnnnnnnnnnnnnnnnnnnnnnnnnnnnnnnnnnnnnnnnnnnnnnnnnnnnnnnnnnnnnnnnnnnnnnnnnnnnnnnnnnnnnnnnnnnnnnnnnnnnnnnnnnnnnnnnnnnnnnnnnnnnnnnnnnnnnnnnnnnnnnnnnnnnnnnnnnnnnnnnnnnnnnnnnnnnnnnnnnnnnnnnnnnnnnnnnnnnnnnnnnnnnnnnnnnnnnnnnnnnnnnnnnnnnnnnnnnnnnnnnnnnnnnnnnnnnnnnnnnnnnnnnnnnnnnnnnnnnnnnnnnnnnnnnnnnnnnnnnnnnnnnnnnnnnnnnnnnnnnnnnnnnnnnnnnnnnnnnnnnnnnnnnnnnnnnnnnnnnnnnnnnnnnnnnnnnnnnnnnnnnnnnnnnnnnnnnnnnnnnnnnnnnnnnnnnnnnnnnnnnnnnnnnnnnnnnnnnnnnnnnnnnnnnnnnnnnnnnnnnnnnnnnnnnnnnnnnnnnnnnnnnnnnnnnnnnnnnnnnnnnnnnnnnnnnnnnnnnnnnnnnnnnnnnnnnnnnnnnnnnnnnnnnnnnnnnnnnnnnnnnnnnnnnnnnnnnnnnnnnnnnnnnnnnnnnnnnnnnnnnnnnnnnnnnnnnnnnnnnnnnnnnnnnnnnnnnnnnnnnnnnnnnnnnnnnnnnnnnnnnnnnnnnnnnnnnnnnnnnnnnnnnnnnnnnnnnnnnnnnnnnnnnnnnnnnnnnnnnnnnnnnnnnnnnnnnnnnnnnnnnnnnnnnnnnnnnnnnnnnnnnnnnnnnnnnnnnnnnnnnnnnnnnnnnnnnnnnnnnnnnnnnnnnnnnnnnnnnnnnnnnnnnnnnnnnnnnnnnnnnnnnnnnnnnnnnnnnnnnnnnnnnnnnnnnnnnnnnnnnnnnnnnnnnnnnnnnnnnnnnnnnnnnnnnnnnnnnnnnnnnnnnnnnnnnnnnnnnnnnnnnnnnnnnnnnnnnnnnnnnnnnnnnnnnnnnnnnnnnnnnnnnnnnnnnnnnnnnnnnnnnnnnnnnnnnnnnnnnnnnnnnnnnnnnnnnnnnnnnnnnnnnnnnnnnnnnnnnnnnnnnnnnnnnnnnnnnnnnnnnnnnnnnnnnnnnnnnnnnnnnnnnnnnnnnnnnnnnnnnnnnnnnnnnnnnnnnnnnnnnnnnnnnnnnnnnnnnnnnnnnnnnnnnnnnnnnnnnnnnnnnnnnnnnnnnnnnnnnnnnnnnnnnnnnnnnnnnnnnnnnnnnnnnnnnnnnnnnnnnnnnnnnnnnnnnnnnnnnnnnnnnnnnnnnnnnnnnnnnnnnnnnnnnnnnnnnnnnnnnnnnnnnnnnnnnnnnnnnnnnnnnnnnnnnnnnnnnnnnnnnnnnnnnnnnnnnnnnnnnnnnnnnnnnnnnnnnnnnnnnnnnnnnnnnnnnnnnnnnnnnnnnnnnnnnnnnnnnnnnnnnnnnnnnnnnnnnnnnnnnnnnnnnnnnnnnnnnnnnnnnnnnnnnnnnnnnnnnnnnnnnnnnnnnnnnnnnnnnnnnnnnnnnnnnnnnnnnnnnnnnnnnnnnnnnnnnnnnnnnnnnnnnnnnnnnnnnnnnnnnnnnnnnnnnnnnnnnnnnnnnnnnnnnnnnnnnnnnnnnnnnnnnnnnnnnnnnnnnnnnnnnnnnnnnnnnnnnnnnnnnnnnnnnnnnnnnnnnnnnnnnnnnnnnnnnnnnnnnnnnnnnnnnnnnnnnnnnnnnnnnnnnnnnnnnnnnnnnnnnnnnnnnnnnnnnnnnnnnnnnnnnnnnnnnnnnnnnnnnnnnnnnnnnnnnnnnnnnnnnnnnnnnnnnnnnnnnnnnnnnnnnnnnnnnnnnnnnnnnnnnnnnnnnnnnnnnnnnnnnnnnnnnnnnnnnnnnnnnnnnnnnnnnnnnnnnnnnnnnnnnnnnnnnnnnnnnnnnnnnnnnnnnnnnnnnnnnnnnnnnnnnnnnnnnnnnnnnnnnnnnnnnnnnnnnnnnnnnnnnnnnnnnnnnnnnnnnnnnnnnnnnnnnnnnnnnnnnnnnnnnnnnnnnnnnnnnnnnnnnnnnnnnnnnnnnnnnnnnnnnnnnnnnnnnnnnnnnnnnnnnnnnnnnnnnnnnnnnnnnnnnnnnnnnnnnnnnnnnnnnnnnnnnnnnnnnnnnnnnnnnnnnnnnnnnnnnnnnnnnnnnnnnnnnnnnnnnnnnnnnnnnnnnnnnnnnnnnnnnnnnnnnnnnnnnnnnnnnnnnnnnnnnnnnnnnnnnnnnnnnnnnnnnnnnnnnnnnnnnnnnnnnnnnnnnnnnnnnnnnnnnnnnnnnnnnnnnnnnnnnnnnnnnnnnnnnnnnnnnnnnnnnnnnnnnnnnnnnnnnnnnnnnnnnnnnnnnnnnnnnnnnnnnnnnnnnnnnnnnnnnnnnnnnnnnnnnnnnnnnnnnnnnnnnnnnnnnnnnnnnnnnnnnnnnnnnnnnnnnnnnnnnnnnnnnnnnnnnnnnnnnnnnnnnnnnnnnnnnnnnnnnnnnnnnnnnnnnnnnnnnnnnnnnnnnnnnnnnnnnnnnnnnnnnnnnnnnnnnnnnnnnnnnnnnnnnnnnnnnnnnnnnnnnnnnnnnnnnnnnnnnnnnnnnnnnnnnnnnnnnnnnnnnnnnnnnnnnnnnnnnnnnnnnnnnnnnnnnnnnnnnnnnnnnnnnnnnnnnnnnnnnnnnnnnnnnnnnnnnnnnnnnnnnnnnnnnnnnnnnnnnnnnnnnnnnnnnnnnnnnnnnnnnnnnnnnnnnnnnnnnnnnnnnnnnnnnnnnnnnnnnnnnnnnnnnnnnnnnnnnnnnnnnnnnnnnnnnnnnnnnnnnnnnnnnnnnnnnnnnnnnnnnnnnnnnnnnnnnnnnnnnnnnnnnnnnnnnnnnnnnnnnnnnnnnnnnnnnnnnnnnnnnnnnnnnnnnnnnnnnnnnnnnnnnnnnnnnnnnnnnnnnnnnnnnnnnnnnnnnnnnnnnnnnnnnnnnnnnnnnnnnnnnnnnnnnnnnnnnnnnnnnnnnnnnnnnnnnnnnnnnnnnnnnnnnnnnnnnnnnnnnnnnnnnnnnnnnnnnnnnnnnnnnnnnnnnnnnnnnnnnnnnnnnnnnnnnnnnnnnnnnnnnnnnnnnnnnnnnnnnnnnnnnnnnnnnnnnnnnnnnnnnnnnnnnnnnnnnnnnnnnnnnnnnnnnnnnnnnnnnnnnnnnnnnnnnnnnnnnnnnnnnnnnnnnnnnnnnnnnnnnnnnnnnnnnnnnnnnnnnnnnnnnnnnnnnnnnnnnnnnnnnnnnnnnnnnnnnnnnnnnnnnnnnnnnnnnnnnnnnnnnnnnnnnnnnnnnnnnnnnnnnnnnnnnnnnnnnnnnnnnnnnnnnnnnnnnnnnnnnnnnnnnnnnnnnnnnnnnnnnnnnnnnnnnnnnnnnnnnnnnnnnnnnnnnnnnnnnnnnnnnnnnnnnnnnnnnnnnnnnnnnnnnnnnnnnnnnnnnnnnnnnnnnnnnnnnnnnnnnnnnnnnnnnnnnnnnnnnnnnnnnnnnnnnnnnnnnnnnnnnnnnnnnnnnnnnnnnnnnnnnnnnnnnnnnnnnnnnnnnnnnnnnnnnnnnnnnnnnnnnnnnnnnnnnnnnnnnnnnnnnnnnnnnnnnnnnnnnnnnnnnnnnnnnnnnnnnnnnnnnnnnnnnnnnnnnnnnnnnnnnnnnnnnnnnnnnnnnnnnnnnnnnnnnnnnnnnnnnnnnnnnnnnnnnnnnnnnnnnnnnnnnnnnnnnnnnnnnnnnnnnnnnnnnnnnnnnnnnnnnnnnnnnnnnnnnnnnnnnnnnnnnnnnnnnnnnnnnnnnnnnnnnnnnnnnnnnnnnnnnnnnnnnnnnnnnnnnnnnnnnnnnnnnnnnnnnnnnnnnnnnnnnnnnnnnnnnnnnnnnnnnnnnnnnnnnnnnnnnnnnnnnnnnnnnnnnnnnnnnnnnnnnnnnnnnnnnnnnnnnnnnnnnnnnnnnnnnnnnnnnnnnnnnnnnnnnnnnnnnnnnnnnnnnnnnnnnnnnnnnnnnnnnnnnnnnnnnnnnnnnnnnnnnnnnnnnnnnnnnnnnnnnnnnnnnnnnnnnnnnnnnnnnnnnnnnnnnnnnnnnnnnnnnnnnnnnnnnnnnnnnnnnnnnnnnnnnnnnnnnnnnnnnnnnnnnnnnnnnnnnnnnnnnnnnnnnnnnnnnnnnnnnnnnnnnnnnnnnnnnnnnnnnnnnnnnnnnnnnnnnnnnnnnnnnnnnnnnnnnnnnnnnnnnnnnnnnnnnnnnnnnnnnnnnnnnnnnnnnnnnnnnnnnnnnnnnnnnnnnnnnnnnnnnnnnnnnnnnnnnnnnnnnnnnnnnnnnnnnnnnnnnnnnnnnnnnnnnnnnnnnnnnnnnnnnnnnnnnnnnnnnnnnnnnnnnnnnnnnnnnnnnnnnnnnnnnnnnnnnnnnnnnnnnnnnnnnnnnnnnnnnnnnnnnnnnnnnnnnnnnnnnnnnnnnnnnnnnnnnnnnnnnnnnnnnnnnnnnnnnnnnnnnnnnnnnnnnnnnnnnnnnnnnnnnnnnnnnnnnnnnnnnnnnnnnnnnnnnnnnnnnnnnnnnnnnnnnnnnnnnnnnnnnnnnnnnnnnnnnnnnnnnnnnnnnnnnnnnnnnnnnnnnnnnnnnnnnnnnnnnnnnnnnnnnnnnnnnnnnnnnnnnnnnnnnnnnnnnnnnnnnnnnnnnnnnnnnnnnnnnnnnnnnnnnnnnnnnnnnnnnnnnnnnnnnnnnnnnnnnnnnnnnnnnnnnnnnnnnnnnnnnnnnnnnnnnnnnnnnnnnnnnnnnnnnnnnnnnnnnnnnnnnnnnnnnnnnnnnnnnnnnnnnnnnnnnnnnnnnnnnnnnnnnnnnnnnnnnnnnnnnnnnnnnnnnnnnnnnnnnnnnnnnnnnnnnnnnnnnnnnnnnnnnnnnnnnnnnnnnnnnnnnnnnnnnnnnnnnnnnnnnnnnnnnnnnnnnnnnnnnnnnnnnnnnnnnnnnnnnnnnnnnnnnnnnnnnnnnnnnnnnnnnnnnnnnnnnnnnnnnnnnnnnnnnnnnnnnnnnnnnnnnnnnnnnnnnnnnnnnnnnnnnnnnnnnnnnnnnnnnnnnnnnnnnnnnnnnnnnnnnnnnnnnnnnnnnnnnnnnnnnnnnnnnnnnnnnnnnnnnnnnnnnnnnnnnnnnnnnnnnnnnnnnnnnnnnnnnnnnnnnnnnnnnnnnnnnnnnnnnnnnnnnnnnnnnnnnnnnnnnnnnnnnnnnnnnnnnnnnnnnnnnnnnnnnnnnnnnnnnnnnnnnnnnnnnnnnnnnnnnnnnnnnnnnnnnnnnnnnnnnnnnnnnnnnnnnnnnnnnnnnnnnnnnnnnnnnnnnnnnnnnnnnnnnnnnnnnnnnnnnnnnnnnnnnnnnnnnnnnnnnnnnnnnnnnnnnnnnnnnnnnnnnnnnnnnnnnnnnnnnnnnnnnnnnnnnnnnnnnnnnnnnnnnnnnnnnnnnnnnnnnnnnnnnnnnnnnnnnnnnnnnnnnnnnnnnnnnnnnnnnnnnnnnnnnnnnnnnnnnnnnnnnnnnnnnnnnnnnnnnnnnnnnnnnnnnnnnnnnnnnnnnnnnnnnnnnnnnnnnnnnnnnnnnnnnnnnnnnnnnnnnnnnnnnnnnnnnnnnnnnnnnnnnnnnnnnnnnnnnnnnnnnnnnnnnnnnnnnnnnnnnnnnnnnnnnnnnnnnnnnnnnnnnnnnnnnnnnnnnnnnnnnnnnnnnnnnnnnnnnnnnnnnnnnnnnnnnnnnnnnnnnnnnnnnnnnnnnnnnnnnnnnnnnnnnnnnnnnnnnnnnnnnnnnnnnnnnnnnnnnnnnnnnnnnnnnnnnnnnnnnnnnnnnnnnnnnnnnnnnnnnnnnnnnnnnnnnnnnnnnnnnnnnnnnnnnnnnnnnnnnnnnnnnnnnnnnnnnnnnnnnnnnnnnnnnnnnnnnnnnnnnnnnnnnnnnnnnnnnnnnnnnnnnnnnnnnnnnnnnnnnnnnnnnnnnnnnnnnnnnnnnnnnnnnnnnnnnnnnnnnnnnnnnnnnnnnnnnnnnnnnnnnnnnnnnnnnnnnnnnnnnnnnnnnnnnnnnnnnnnnnnnnnnnnnnnnnnnnnnnnnnnnnnnnnnnnnnnnnnnnnnnnnnnnnnnnnnnnnnnnnnnnnnnnnnnnnnnnnnnnnnnnnnnnnnnnnnnnnnnnnnnnnnnnnnnnnnnnnnnnnnnnnnnnnnnnnnnnnnnnnnnnnnnnnnnnnnnnnnnnnnnnnnnnnnnnnnnnnnnnnnnnnnnnnnnnnnnnnnnnnnnnnnnnnnnnnnnnnnnnnnnnnnnnnnnnnnnnnnnnnnnnnnnnnnnnnnnnnnnnnnnnnnnnnnnnnnnnnnnnnnnnnnnnnnnnnnnnnnnnnnnnnnnnnnnnnnnnnnnnnnnnnnnnnnnnnnnnnnnnnnnnnnnnnnnnnnnnnnnnnnnnnnnnnnnnnnnnnnnnnnnnnnnnnnnnnnnnnnnnnnnnnnnnnnnnnnnnnnnnnnnnnnnnnnnnnnnnnnnnnnnnnnnnnnnnnnnnnnnnnnnnnnnnnnnnnnnnnnnnnnnnnnnnnnnnnnnnnnnnnnnnnnnnnnnnnnnnnnnnnnnnnnnnnnnnnnnnnnnnnnnnnnnnnnnnnnnnnnnnnnnnnnnnnnnnnnnnnnnnnnnnnnnnnnnnnnnnnnnnnnnnnnnnnnnnnnnnnnnnnnnnnnnnnnnnnnnnnnnnnnnnnnnnnnnnnnnnnnnnnnnnnnnnnnnnnnnnnnnnnnnnnnnnnnnnnnnnnnnnnnnnnnnnnnnnnnnnnnnnnnnnnnnnnnnnnnnnnnnnnnnnnnnnnnnnnnnnnnnnnnnnnnnnnnnnnnnnnnnnnnnnnnnnnnnnnnnnnnnnnnnnnnnnnnnnnnnnnnnnnnnnnnnnnnnnnnnnnnnnnnnnnnnnnnnnnnnnnnnnnnnnnnnnnnnnnnnnnnnnnnnnnnnnnnnnnnnnnnnnnnnnnnnnnnnnnnnnnnnnnnnnnnnnnnnnnnnnnnnnnnnnnnnnnnnnnnnnnnnnnnnnnnnnnnnnnnnnnnnnnnnnnnnnnnnnnnnnnnnnnnnnnnnnnnnnnnnnnnnnnnnnnnnnnnnnnnnnnnnnnnnnnnnnnnnnnnnnnnnnnnnnnnnnnnnnnnnnnnnnnnnnnnnnnnnnnnnnnnnnnnnnnnnnnnnnnnnnnnnnnnnnnnnnnnnnnnnnnnnnnnnnnnnnnnnnnnnnnnnnnnnnnnnnnnnnnnnnnnnnnnnnnnnnnnnnnnnnnnnnnnnnnnnnnnnnnnnnnnnnnnnnnnnnnnnnnnnnnnnnnnnnnnnnnnnnnnnnnnnnnnnnnnnnnnnnnnnnnnnnnnnnnnnnnnnnnnnnnnnnnnnnnnnnnnnnnnnnnnnnnnnnnnnnnnnnnnnnnnnnnnnnnnnnnnnnnnnnnnnnnnnnnnnnnnnnnnnnnnnnnnnnnnnnnnnnnnnnnnnnnnnnnnnnnnnnnnnnnnnnnnnnnnnnnnnnnnnnnnnnnnnnnnnnnnnnnnnnnnnnnnnnnnnnnnnnnnnnnnnnnnnnnnnnnnnnnnnnnnnnnnnnnnnnnnnnnnnnnnnnnnnnnnnnnnnnnnnnnnnnnnnnnnnnnnnnnnnnnnnnnnnnnnnnnnnnnnnnnnnnnnnnnnnnnnnnnnnnnnnnnnnnnnnnnnnnnnnnnnnnnnnnnnnnnnnnnnnnnnnnnnnnnnnnnnnnnnnnnnnnnnnnnnnnnnnnnnnnnnnnnnnnnnnnnnnnnnnnnnnnnnnnnnnnnnnnnnnnnnnnnnnnnnnnnnnnnnnnnnnnnnnnnnnnnnnnnnnnnnnnnnnnnnnnnnnnnnnnnnnnnnnnnnnnnnnnnnnnnnnnnnnnnnnnnnnnnnnnnnnnnnnnnnnnnnnnnnnnnnnnnnnnnnnnnnnnnnnnnnnnnnnnnnnnnnnnnnnnnnnnnnnnnnnnnnnnnnnnnnnnnnnnnnnnnnnnnnnnnnnnnnnnnnnnnnnnnnnnnnnnnnnnnnnnnnnnnnnnnnnnnnnnnnnnnnnnnnnnnnnnnnnnnnnnnnnnnnnnnnnnnnnnnnnnnnnnnnnnnnnnnnnnnnnnnnnnnnnnnnnnnnnnnnnnnnnnnnnnnnnnnnnnnnnnnnnnnnnnnnnnnnnnnnnnnnnnnnnnnnnnnnnnnnnnnnnnnnnnnnnnnnnnnnnnnnnnnnnnnnnnnnnnnnnnnnnnnnnnnnnnnnnnnnnnnnnnnnnnnnnnnnnnnnnnnnnnnnnnnnnnnnnnnnnnnnnnnnnnnnnnnnnnnnnnnnnnnnnnnnnnnnnnnnnnnnnnnnnnnnnnnnnnnnnnnnnnnnnnnnnnnnnnnnnnnnnnnnnnnnnnnnnnnnnnnnnnnnnnnnnnnnnnnnnnnnnnnnnnnnnnnnnnnnnnnnnnnnnnnnnnnnnnnnnnnnnnnnnnnnnnnnnnnnnnnnnnnnnnnnnnnnnnnnnnnnnnnnnnnnnnnnnnnnnnnnnnnnnnnnnnnnnnnnnnnnnnnnnnnnnnnnnnnnnnnnnnnnnnnnnnnnnnnnnnnnnnnnnnnnnnnnnnnnnnnnnnnnnnnnnnnnnnnnnnnnnnnnnnnnnnnnnnnnnnnnnnnnnnnnnnnnnnnnnnnnnnnnnnnnnnnnnnnnnnnnnnnnnnnnnnnnnnnnnnnnnnnnnnnnnnnnnnnnnnnnnnnnnnnnnnnnnnnnnnnnnnnnnnnnnnnnnnnnnnnnnnnnnnnnnnnnnnnnnnnnnnnnnnnnnnnnnnnnnnnnnnnnnnnnnnnnnnnnnnnnnnnnnnnnnnnnnnnnnnnnnnnnnnnnnnnnnnnnnnnnnnnnnnnnnnnnnnnnnnnnnnnnnnnnnnnnnnnnnnnnnnnnnnnnnnnnnnnnnnnnnnnnnnnnnnnnnnnnnnnnnnnnnnnnnnnnnnnnnnnnnnnnnnnnnnnnnnnnnnnnnnnnnnnnnnnnnnnnnnnnnnnnnnnnnnnnnnnnnnnnnnnnnnnnnnnnnnnnnnnnnnnnnnnnnnnnnnnnnnnnnnnnnnnnnnnnnnnnnnnnnnnnnnnnnnnnnnnnnnnnnnnnnnnnnnnnnnnnnnnnnnnnnnnnnnnnnnnnnnnnnnnnnnnnnnnnnnnnnnnnnnnnnnnnnnnnnnnnnnnnnnnnnnnnnnnnnnnnnnnnnnnnnnnnnnnnnnnnnnnnnnnnnnnnnnnnnnnnnnnnnnnnnnnnnnnnnnnnnnnnnnnnnnnnnnnnnnnnnnnnnnnnnnnnnnnnnnnnnnnnnnnnnnnnnnnnnnnnnnnnnnnnnnnnnnnnnnnnnnnnnnnnnnnnnnnnnnnnnnnnnnnnnnnnnnnnnnnnnnnnnnnnnnnnnnnnnnnnnnnnnnnnnnnnnnnnnnnnnnnnnnnnnnnnnnnnnnnnnnnnnnnnnnnnnnnnnnnnnnnnnnnnnnnnnnnnnnnnnnnnnnnnnnnnnnnnnnnnnnnnnnnnnnnnnnnnnnnnnnnnnnnnnnnnnnnnnnnnnnnnnnnnnnnnnnnnnnnnnnnnnnnnnnnnnnnnnnnnnnnnnnnnnnnnnnnnnnnnnnnnnnnnnnnnnnnnnnnnnnnnnnnnnnnnnnnnnnnnnnnnnnnnnnnnnnnnnnnnnnnnnnnnnnnnnnnnnnnnnnnnnnnnnnnnnnnnnnnnnnnnnnnnnnnnnnnnnnnnnnnnnnnnnnnnnnnnnnnnnnnnnnnnnnnnnnnnnnnnnnnnnnnnnnnnnnnnnnnnnnnnnnnnnnnnnnnnnnnnnnnnnnnnnnnnnnnnnnnnnnnnnnnnnnnnnnnnnnnnnnnnnnnnnnnnnnnnnnnnnnnnnnnnnnnnnnnnnnnnnnnnnnnnnnnnnnnnnnnnnnnnnnnnnnnnnnnnnnnnnnnnnnnnnnnnnnnnnnnnnnnnnnnnnnnnnnnnnnnnnnnnnnnnnnnnnnnnnnnnnnnnnnnnnnnnnnnnnnnnnnnnnnnnnnnnnnnnnnnnnnnnnnnnnnnnnnnnnnnnnnnnnnnnnnnnnnnnnnnnnnnnnnnnnnnnnnnnnnnnnnnnnnnnnnnnnnnnnnnnnnnnnnnnnnnnnnnnnnnnnnnnnnnnnnnnnnnnnnnnnnnnnnnnnnnnnnnnnnnnnnnnnnnnnnnnnnnnnnnnnnnnnnnnnnnnnnnnnnnnnnnnnnnnnnnnnnnnnnnnnnnnnnnnnnnnnnnnnnnnnnnnnnnnnnnnnnnnnnnnnnnnnnnnnnnnnnnnnnnnnnnnnnnnnnnnnnnnnnnnnnnnnnnnnnnnnnnnnnnnnnnnnnnnnnnnnnnnnnnnnnnnnnnnnnnnnnnnnnnnnnnnnnnnnnnnnnnnnnnnnnnnnnnnnnnnnnnnnnnnnnnnnnnnnnnnnnnnnnnnnnnnnnnnnnnnnnnnnnnnnnnnnnnnnnnnnnnnnnnnnnnnnnnnnnnnnnnnnnnnnnnnnnnnnnnnnnnnnnnnnnnnnnnnnnnnnnnnnnnnnnnnnnnnnnnnnnnnnnnnnnnnnnnnnnnnnnnnnnnnnnnnnnnnnnnnnnnnnnnnnnnnnnnnnnnnnnnnnnnnnnnnnnnnnnnnnnnnnnnnnnnnnnnnnnnnnnnnnnnnnnnnnnnnnnnnnnnnnnnnnnnnnnnnnnnnnnnnnnnnnnnnnnnnnnnnnnnnnnnnnnnnnnnnnnnnnnnnnnnnnnnnnnnnnnnnnnnnnnnnnnnnnnnnnnnnnnnnnnnnnnnnnnnnnnnnnnnnnnnnnnnnnnnnnnnnnnnnnnnnnnnnnnnnnnnnnnnnnnnnnnnnnnnnnnnnnnnnnnnnnnnnnnnnnnnnnnnnnnnnnnnnnnnnnnnnnnnnnnnnnnnnnnnnnnnnnnnnnnnnnnnnnnnnnnnnnnnnnnnnnnnnnnnnnnnnnnnnnnnnnnnnnnnnnnnnnnnnnnnnnnnnnnnnnnnnnnnnnnnnnnnnnnnnnnnnnnnnnnnnnnnnnnnnnnnnnnnnnnnnnnnnnnnnnnnnnnnnnnnnnnnnnnnnnnnnnnnnnnnnnnnnnnnnnnnnnnnnnnnnnnnnnnnnnnnnnnnnnnnnnnnnnnnnnnnnnnnnnnnnnnnnnnnnnnnnnnnnnnnnnnnnnnnnnnnnnnnnnnnnnnnnnnnnnnnnnnnnnnnnnnnnnnnnnnnnnnnnnnnnnnnnnnnnnnnnnnnnnnnnnnnnnnnnnnnnnnnnnnnnnnnnnnnnnnnnnnnnnnnnnnnnnnnnnnnnnnnnnnnnnnnnnnnnnnnnnnnnnnnnnnnnnnnnnnnnnnnnnnnnnnnnnnnnnnnnnnnnnnnnnnnnnnnnnnnnnnnnnnnnnnnnnnnnnnnnnnnnnnnnnnnnnnnnnnnnnnnnnnnnnnnnnnnnnnnnnnnnnnnnnnnnnnnnnnnnnnnnnnnnnnnnnnnnnnnnnnnnnnnnnnnnnnnnnnnnnnnnnnnnnnnnnnnnnnnnnnnnnnnnnnnnnnnnnnnnnnnnnnnnnnnnnnnnnnnnnnnnnnnnnnnnnnnnnnnnnnnnnnnnnnnnnnnnnnnnnnnnnnnnnnnnnnnnnnnnnnnnnnnnnnnnnnnnnnnnnnnnnnnnnnnnnnnnnnnnnnnnnnnnnnnnnnnnnnnnnnnnnnnnnnnnnnnnnnnnnnnnnnnnnnnnnnnnnnnnnnnnnnnnnnnnnnnnnnnnnnnnnnnnnnnnnnnnnnnnnnnnnnnnnnnnnnnnnnnnnnnnnnnnnnnnnnnnnnnnnnnnnnnnnnnnnnnnnnnnnnnnnnnnnnnnnnnnnnnnnnnnnnnnnnnnnnnnnnnnnnnnnnnnnnnnnnnnnnnnnnnnnnnnnnnnnnnnnnnnnnnnnnnnnnnnnnnnnnnnnnnnnnnnnnnnnnnnnnnnnnnnnnnnnnnnnnnnnnnnnnnnnnnnnnnnnnnnnnnnnnnnnnnnnnnnnnnnnnnnnnnnnnnnnnnnnnnnnnnnnnnnnnnnnnnnnnnnnnnnnnnnnnnnnnnnnnnnnnnnnnnnnnnnnnnnnnnnnnnnnnnnnnnnnnnnnnnnnnnnnnnnnnnnnnnnnnnnnnnnnnnnnnnnnnnnnnnnnnnnnnnnnnnnnnnnnnnnnnnnnnnnnnnnnnnnnnnnnnnnnnnnnnnnnnnnnnnnnnnnnnnnnnnnnnnnnnnnnnnnnnnnnnnnnnnnnnnnnnnnnnnnnnnnnnnnnnnnnnnnnnnnnnnnnnnnnnnnnnnnnnnnnnnnnnnnnnnnnnnnnnnnnnnnnnnnnnnnnnnnnnnnnnnnnnnnnnnnnnnnnnnnnnnnnnnnnnnnnnnnnnnnnnnnnnnnnnnnnnnnnnnnnnnnnnnnnnnnnnnnnnnnnnnnnnnnnnnnnnnnnnnnnnnnnnnnnnnnnnnnnnnnnnnnnnnnnnnnnnnnnnnnnnnnnnnnnnnnnnnnnnnnnnnnnnnnnnnnnnnnnnnnnnnnnnnnnnnnnnnnnnnnnnnnnnnnnnnnnnnnnnnnnnnnnnnnnnnnnnnnnnnnnnnnnnnnnnnnnnnnnnnnnnnnnnnnnnnnnnnnnnnnnnnnnnnnnnnnnnnnnnnnnnnnnnnnnnnnnnnnnnnnnnnnnnnnnnnnnnnnnnnnnnnnnnnnnnnnnnnnnnnnnnnnnnnnnnnnnnnnnnnnnnnnnnnnnnnnnnnnnnnnnnnnnnnnnnnnnnnnnnnnnnnnnnnnnnnnnnnnnnnnnnnnnnnnnnnnnnnnnnnnnnnnnnnnnnnnnnnnnnnnnnnnnnnnnnnnnnnnnnnnnnnnnnnnnnnnnnnnnnnnnnnnnnnnnnnnnnnnnnnnnnnnnnnnnnnnnnnnnnnnnnnnnnnnnnnnnnnnnnnnnnnnnnnnnnnnnnnnnnnnnnnnnnnnnnnnnnnnnnnnnnnnnnnnnnnnnnnnnnnnnnnnnnnnnnnnnnnnnnnnnnnnnnnnnnnnnnnnnnnnnnnnnnnnnnnnnnnnnnnnnnnnnnnnnnnnnnnnnnnnnnnnnnnnnnnnnnnnnnnnnnnnnnnnnnnnnnnnnnnnnnnnnnnnnnnnnnnnnnnnnnnnnnnnnnnnnnnnnnnnnnnnnnnnnnnnnnnnnnnnnnnnnnnnnnnnnnnnnnnnnnnnnnnnnnnnnnnnnnnnnnnnnnnnnnnnnnnnnnnnnnnnnnnnnnnnnnnnnnnnnnnnnnnnnnnnnnnnnnnnnnnnnnnnnnnnnnnnnnnnnnnnnnnnnnnnnnnnnnnnnnnnnnnnnnnnnnnnnnnnnnnnnnnnnnnnnnnnnnnnnnnnnnnnnnnnnnnnnnnnnnnnnnnnnnnnnnnnnnnnnnnnnnnnnnnnnnnnnnnnnnnnnnnnnnnnnnnnnnnnnnnnnnnnnnnnnnnnnnnnnnnnnnnnnnnnnnnnnnnnnnnnnnnnnnnnnnnnnnnnnnnnnnnnnnnnnnnnnnnnnnnnnnnnnnnnnnnnnnnnnnnnnnnnnnnnnnnnnnnnnnnnnnnnnnnnnnnnnnnnnnnnnnnnnnnnnnnnnnnnnnnnnnnnnnnnnnnnnnnnnnnnnnnnnnnnnnnnnnnnnnnnnnnnnnnnnnnnnnnnnnnnnnnnnnnnnnnnnnnnnnnnnnnnnnnnnnnnnnnnnnnnnnnnnnnnnnnnnnnnnnnnnnnnnnnnnnnnnnnnnnnnnnnnnnnnnnnnnnnnnnnnnnnnnnnnnnnnnnnnnnnnnnnnnnnnnnnnnnnnnnnnnnnnnnnnnnnnnnnnnnnnnnnnnnnnnnnnnnnnnnnnnnnnnnnnnnnnnnnnnnnnnnnnnnnnnnnnnnnnnnnnnnnnnnnnnnnnnnnnnnnnnnnnnnnnnnnnnnnnnnnnnnnnnnnnnnnnnnnnnnnnnnnnnnnnnnnnnnnnnnnnnnnnnnnnnnnnnnnnnnnnnnnnnnnnnnnnnnnnnnnnnnnnnnnnnnnnnnnnnnnnnnnnnnnnnnnnnnnnnnnnnnnnnnnnnnnnnnnnnnnnnnnnnnnnnnnnnnnnnnnnnnnnnnnnnnnnnnnnnnnnnnnnnnnnnnnnnnnnnnnnnnnnnnnnnnnnnnnnnnnnnnnnnnnnnnnnnnnnnnnnnnnnnnnnnnnnnnnnnnnnnnnnnnnnnnnnnnnnnnnnnnnnnnnnnnnnnnnnnnnnnnnnnnnnnnnnnnnnnnnnnnnnnnnnnnnnnnnnnnnnnnnnnnnnnnnnnnnnnnnnnnnnnnnnnnnnnnnnnnnnnnnnnnnnnnnnnnnnnnnnnnnnnnnnnnnnnnnnnnnnnnnnnnnnnnnnnnnnnnnnnnnnnnnnnnnnnnnnnnnnnnnnnnnnnnnnnnnnnnnnnnnnnnnnnnnnnnnnnnnnnnnnnnnnnnnnnnnnnnnnnnnnnnnnnnnnnnnnnnnnnnnnnnnnnnnnnnnnnnnnnnnnnnnnnnnnnnnnnnnnnnnnnnnnnnnnnnnnnnnnnnnnnnnnnnnnnnnnnnnnnnnnnnnnnnnnnnnnnnnnnnnnnnnnnnnnnnnnnnnnnnnnnnnnnnnnnnnnnnnnnnnnnnnnnnnnnnnnnnnnnnnnnnnnnnnnnnnnnnnnnnnnnnnnnnnnnnnnnnnnnnnnnnnnnnnnnnnnnnnnnnnnnnnnnnnnnnnnnnnnnnnnnnnnnnnnnnnnnnnnnnnnnnnnnnnnnnnnnnnnnnnnnnnnnnnnnnnnnnnnnnnnnnnnnnnnnnnnnnnnnnnnnnnnnnnnnnnnnnnnnnnnnnnnnnnnnnnnnnnnnnnnnnnnnnnnnnnnnnnnnnnnnnnnnnnnnnnnnnnnnnnnnnnnnnnnnnnnnnnnnnnnnnnnnnnnnnnnnnnnnnnnnnnnnnnnnnnnnnnnnnnnnnnnnnnnnnnnnnnnnnnnnnnnnnnnnnnnnnnnnnnnnnnnnnnnnnnnnnnnnnnnnnnnnnnnnnnnnnnnnnnnnnnnnnnnnnnnnnnnnnnnnnnnnnnnnnnnnnnnnnnnnnnnnnnnnnnnnnnnnnnnnnnnnnnnnnnnnnnnnnnnnnnnnnnnnnnnnnnnnnnnnnnnnnnnnnnnnnnnnnnnnnnnnnnnnnnnnnnnnnnnnnnnnnnnnnnnnnnnnnnnnnnnnnnnnnnnnnnnnnnnnnnnnnnnnnnnnnnnnnnnnnnnnnnnnnnnnnnnnnnnnnnnnnnnnnnnnnnnnnnnnnnnnnnnnnnnnnnnnnnnnnnnnnnnnnnnnnnnnnnnnnnnnnnnnnnnnnnnnnnnnnnnnnnnnnnnnnnnnnnnnnnnnnnnnnnnnnnnnnnnnnnnnnnnnnnnnnnnnnnnnnnnnnnnnnnnnnnnnnnnnnnnnnnnnnnnnnnnnnnnnnnnnnnnnnnnnnnnnnnnnnnnnnnnnnnnnnnnnnnnnnnnnnnnnnnnnnnnnnnnnnnnnnnnnnnnnnnnnnnnnnnnnnnnnnnnnnnnnnnnnnnnnnnnnnnnnnnnnnnnnnnnnnnnnnnnnnnnnnnnnnnnnnnnnnnnnnnnnnnnnnnnnnnnnnnnnnnnnnnnnnnnnnnnnnnnnnnnnnnnnnnnnnnnnnnnnnnnnnnnnnnnnnnnnnnnnnnnnnnnnnnnnnnnnnnnnnnnnnnnnnnnnnnnnnnnnnnnnnnnnnnnnnnnnnnnnnnnnnnnnnnnnnnnnnnnnnnnnnnnnnnnnnnnnnnnnnnnnnnnnnnnnnnnnnnnnnnnnnnnnnnnnnnnnnnnnnnnnnnnnnnnnnnnnnnnnnnnnnnnnnnnnnnnnnnnnnnnnnnnnnnnnnnnnnnnnnnnnnnnnnnnnnnnnnnnnnnnnnnnnnnnnnnnnnnnnnnnnnnnnnnnnnnnnnnnnnnnnnnnnnnnnnnnnnnnnnnnnnnnnnnnnnnnnnnnnnnnnnnnnnnnnnnnnnnnnnnnnnnnnnnnnnnnnnnnnnnnnnnnnnnnnnnnnnnnnnnnnnnnnnnnnnnnnnnnnnnnnnnnnnnnnnnnnnnnnnnnnnnnnnnnnnnnnnnnnnnnnnnnnnnnnnnnnnnnnnnnnnnnnnnnnnnnnnnnnnnnnnnnnnnnnnnnnnnnnnnnnnnnnnnnnnnnnnnnnnnnnnnnnnnnnnnnnnnnnnnnnnnnnnnnnnnnnnnnnnnnnnnnnnnnnnnnnnnnnnnnnnnnnnnnnnnnnnnnnnnnnnnnnnnnnnnnnnnnnnnnnnnnnnnnnnnnnnnnnnnnnnnnnnnnnnnnnnnnnnnnnnnnnnnnnnnnnnnnnnnnnnnnnnnnnnnnnnnnnnnnnnnnnnnnnnnnnnnnnnnnnnnnnnnnnnnnnnnnnnnnnnnnnnnnnnnnnnnnnnnnnnnnnnnnnnnnnnnnnnnnnnnnnnnnnnnnnnnnnnnnnnnnnnnnnnnnnnnnnnnnnnnnnnnnnnnnnnnnnnnnnnnnnnnnnnnnnnnnnnnnnnnnnnnnnnnnnnnnnnnnaactgagcctgaccgagatgggtcggtgttggaaccacgcattgaatcagtagtcttctgacctcggcaccaaagcgagccgtacgaccgcaatctcaagagaccaatccataaggaaatcgactatgcaccaactacgtcctcatggaagccgaaaattccacggccgctaccaacatatagcttggaagagcctaggaggcgaggggttatttgccaaggccaaaagtaaaatggatgcgtgtgatacgtcagcccagccgagttgaccagagcgatgagacggcttgtcatctccctcctattacgagtcgtaagtgagtgtcgcctgccgtccggaaagtatctgatcgcatattgcgcccgttcatcgcctcaagtcccgtcaccgttgggcgtctcatgcccgtgttgcgttgcaaggaactatgggcaggtatagagtgtttactgttgatcaggtacaagttccaggaatgggcaaaccggctggaacgaggggcacacacactggcgacagtggtgaatctctgagctataaccaaatcctgtggatgagatcgtgataaaggcggcgtaccttgggtgtgtctaacgcacccacaaggcccaacacgggcaggagtacgccaccatgcataaagctacccccgattcgattccgtttccaactggcgattcgtcatcgcctgacccgggcgatcttctcacgcacatcgtgaccaccggagcccggcagatgctcatccatgccatcgaagctgaagccgcgcagtggatcgccgaccgtcaccatctgctcgacgatgccggccatcgccaggtcgttcgcaacggtcacgccgcgccgcgtaccatcgtcaccggcgtcggcccgatgcacgtgaagatgccgcgcgtgcatgatcggagacctgagccgcagaaggagcgattcacctccgccatcttgcccccgtatctgcgcaaggccaaagcgatcgaggagctgatcccctggctctacctcaagggcgtctcgacgggcgatttcaccgaagctttgcaagccctcgtcggccccgattgcccgggcctttctgcatccaccgtcacgcgccttgtgtcgcagtggcaggatgaacatcaagactggtcgcgtcgcgatctgtcagagaaacactatgtctacgtctgggccgatggcattcacttcaacattcggctggaggaagatcgtcaatgtatccttgttttgatgggcgcaacggcggacggcacgaaggaactgatcgctgtgcaggatggacatcgtgagagcgagcagtcgtggatgacgatgctgctggacttgaaacatcgcgggcttacgattgctccgaacatcgccacagccgacggcgcattgggattctgggcggcgcttcgcaaggtctggccgacgacgcgcgagcagcgctgctgggtgcataagaccgccaacgtgctgaacaatctgcccaagcggttgcagccggcggcgaagaatcagttgcatcagatctggatggcaccgacgcgcaaggaagccgggcgcgcgttcgatctgttcgtcgagacgtaccaggccaagtacgaagctgcggtcacttgcctgacgaaggatcgcgatgtgctgctaacgttctacgacttcccggctgagcattggattcacttgcgcacgaccaacccgatcgagagcacgttcgcgacggtgcgcctgcgtcatcgcaagacgaaaggaaacggctcacgcaaggcgtgcctggcgatggtcttcaagctggccgagtcggcacagaagcgatggcgacgattgaataaacatgaactgatccaagatgtgatcgccggcgtgacgttcacggacggcgaaaagaaacaggccgcctgatcacgccgtccacaggatttgaccatagctcctgaatcacagcgatggttgagtgctggaatacggggattatgcaattttctgttgtatgacgcagccatttgatatagcagatgccaattcatgaattgagcgtcttcctaatcattgctattgtggtgggctatacgaacccatcatagaccagtatgcctcggcaaaaagtacgttaaactgttcacactgctaggcaggattcaagttttggacagggtgtagatcaagtgacacctggaccatggcgaggccgtcgccccgatgcgcatcgtcggcacccttcacggcgagtctaagctgggccgtgcaaccctagaggcagcacccgattgggatatggacagtctgatgtgggcacgtttgatgtaactgggagggctaggcgatgagctttaatctgatcgaagagcaatggatcccaatcctccgaaccaacggcgcgccggatcgcgtgggtatcaggaacgccctgatcaatgcgggcgatatccgtctgactgccgcgtcgaacccgatggacaacatcacactattgaggttcatgctggccgtattaatgtggtgcaagccgagcatgagcgatgaggaccgcaaggtactcaatggcggaacgggcatcccggaggagtggataactaatcttggcacgcctgcgaaacctgcggaggcgttcaatctgcttggggatcaggaacgtttttttcaagaccgccaactactcgaagttctgttgaaagagaggcagaggcaatgggacgcgcgcgaacggaagaaggcaactaaaggtaagagccagcgaccaacttcgctgattgatgaagattaccgccccatcggtgatctactagtcgaattcccaactgaaaccaagagcgtccattttcgccatgtgcgagacaaagagtacggattttgcccggcctgctgtgctctcggcatcatccgcttttgtggttgggccaatgcttatggcggcggccgatacacatctgcaatcaatggacctacaccagcctatgcggttccgtacggcaccacgcttcttcaatcacttgcaatgaattggccatcaggcacaactgaggcgactaagccgccttggctgaccaacaacgcaccatcaaaggacaatctcaattcgcttcatgcctttgcgtggagatcgcgtcaaatttggctaggcgatcaacagcctaccatggagccctgtagctattgcggggatgtcgcaagattgatctatcaacacgtgttcactggcaactggaagccgccgttcgcaactgttggcacgcaaaaaaaattctgggacaaggattcgcatttgatccttgaggcgaagtcgacgaacagcgacaacgaggatgacagcggtagtcttgacgaagatggcataaatccagattcttcttcaattgactccagtgcctcacaaaaacgaaaaagtacaaagccaacgcagcaaacaacgctcgggtttccttctccgggatcaagcgccacggctcataaccgattctggcgccgagcctggcgagccatactcgctggagatgacaatcgagcgggacacacaaccatggtcgtcggcccggcagcgaacaaagggctttatcaggatgccaccgtgttgaatttgccggctgttcctacgaatgccagtcaagaagttcgggaaacaatcaattcgctttttagtaccacagagcaactcatgagtgtgctcagaagaagcacactgaaccctgaccgacaacaccccaacagaaaagcatgtctggatgcacggtcacctgacttggaagcatatttccgcatgcaagtcgaacagtggcttgccatcatggcaaccccggatgcagatgcttcgctgaacagttactcagagcagttggcaagcaaactttattgcatcatcaatgacgttgttcgctccacaacggtcggttcaccacttcgccgacgtgaggcgatgcaacgcgcggcaaaggctctcagtgaaacattacgtaagtatgggtcgcactcaaacaagctgccgccatcaggcggctctacgcccaagcaccaagatcccaatgcgaaggagagccatacatgagccagtccgagtccttcatcaagcgtcttgaggcgttgcaggagggcgagcgcgcctgtctgcgccggctcgcaggcatgccgctggacaccacggttgctggatttgacctgttcaccggcctgtggtggccactgagacagaaaagtcctgtcgccccgcgtcgcgagacgagttggttgatcgccaagctctatggggcttttccaattccgaacactccgtttgaagacgggaagaatcgacaattgctagcgcgggtgcttcgtcgctgtgagccgcatgatgatcacaatggcccgcgtttccgcagtcgcttcgatgccctgttgtgttcgccattgccgtccatcgagccgcatctgcgctgggcattgggcgaaatctccaaagcgatcgccgggcgagtgcagtgggccaagggcgtcactagcattaattgggcacaactactcgatgatctgtcaatctgggaccggggcgaggaccatcgccggggccgtgacattcgcgatatctgggcggaagactatctgaacgacacacaccaactgcaaggagccagcaatgctgattgagatacacataatccagaaccatagcccgtcgaaccttaaccgcgacgacctaggagcacccaagacgtgtctattcggtggtgtcacccgggcccgcatctccagccagtgcctcaagcgaagtatccggcgtagcgacgactttcagcaagcggtggcaaagcacggagccatccgcacccgcggtctcatcagcgagatcgctcgccgagcacaaggcaatggcgaaccgcaggatgcgctgctcaatcgaatccgcaagattttcgaagatggaggcgttggcgtcaacgagtccggcggggacgcgaccgctaccgacattctattctttgttcccgattcggcgatccaacagatggccgaggcggctaatgcgaacgaacccaacatggcggatgtatttgccaaaatcctcaacgaagccgcgcacgtccctgacattgccctctcgggccgtatgaccgagttcaaagcgaagggtcatttcgcaaaccttaacttcaccgtcgaagcggctctgtccgccgcccatgccatctcaacgcacgaagtgatcaacgaggtcgattacttcacagcagttgatgaccttgccaccggaaccggcgcggggcacgtaaacgaggccatgtttgcgtcggcctgcttctacaaacatttttgcatcgactgggaccaactcgtcaccaatctcggcggagatgtcgagcttgcgacaaccacagttcggcagttcctcaatgctgcggccctggccacgccatcgggcaagcagaagagtttcgcggcattcaatcctcctgagggcgtgctcgtggaaatcaagacggagcggtgcgtaccggtgagctatgccaacgcttttgcagacccggtgctgccaaagtccccacgtggcatgatcggcgaaagcatcgctcgtctcggccagcacgtccacgagatcgccgaaggctacggcattatggcgacgcgctattggttctcacctggaaaccggtatccgctcacttggttagatcgcgacgaagccagtgtggcaaagcaggaaaagccagtggttggcggtgctgagagtttcagttcgtttgaaacactcgtaacgaaggtgatgaacaccgtaaatatggacaacgctgccaccgccggagccgcattatgattcaccataccgtgttcctacgcctcgaaggcccccttcaggcttggggcgacacttcgaagtttgtcgtccgtcgaagcatggacgcgcctacgaaatccggtgtactgggtttgatctgttgcgcgatgggattgtcgcggcaggcggcacgggatcgattggtggatttgaacggccttacgatgggcgtgcgtatcgaccgggcaggaacgcgctggtgggactaccacaccgttggggctggcattgggctgatgacagcagcgggcaaactaaagatgggggcacagggcactctcgtcacccgccgcgaatacctcgccgatgcaagtttcctagtcgcgctcagcggcgacgccgcgattatcaacgaagtcgctctcgcactttcatcacccatgtggccaatctacctcggccgtaagtcctgctcacccgccgtaccaatattggcacggccgcgtgagggtgagtcttggacgaaccccgggatccacagcaacctgacagctgcgcttgaggcagtgccgtggccacctcgctatgacaccgatgccccatacgatgcgagacacaacaggatcaagacgattgatctgccatgcttgatcgaatggtgcgcgacggagttgcaaaccatcgcgccagccgccgccgaggtctggtacgacgctcccgttgccttcaccccgcaggtccatcagccacggctcgttgtccgtaaatcggtcgaggtcatggtcggcaaagcacttcagcagcatgcttcagcaccgcctcgcccccgtgctaactacactaattctgaatggaccagcgaacggctcgtggatgttgtgaatgaacgaaccggcgaagtgacgcgggaaccctatggcgcaagaccccggcgactacatcgcgatcacggcctttgtgtcttctgcaagtcccccgccaataccgtgcaacacgtcacctaccgccgcgccggtggcgatgagacgcaggaagacctccgctcgctttgccggttgtgccacgatgcggtgacaatgatcgagtacggactgggcatgggcttggaccggatcaaccccgaggattctcagtaccgcgagcggatcatcgccaagcgaacggagatcatccagtttcgctcactagaaaaccgccgtcgtcagctacaagctgaggagatcgaataacgatgtacatgtccaccttgctcattgatgtggggatcaatcccgatcgggttcgcccgggtcggcaatggctgcgcaatatgtaccgtgtacatcaacgtctctgtatggcgttcccattccctgatacgaaggcgaacgatcctgaatttctaaagccctatcggccagacgcattccacaatccccagccagaccgaggtttcacaagtagcgtagtgaatgcaggagagcctaatgctttgagcaacagacctgtgcatgagccgcgcgatgactcgcacaacttcctattccgtgttgaccctctgcccggtggacgtgttgtgatccttgtgaaatcagccatccaacctgattgggactacgctttccacaacgcccaacatttgctcgctgccccgccttcaatcacagggcatgttcggttgtcgtttggaatggatgcgatattacggttccaactggtcgccaatccaacacgcaagatcgataccaagagcgacgccgacggacgacgccgcaatggcaagcgtgttcctgtgccgccgaccgatgaagcgctgcagacctggctgcaacaacgggcagatgccaacggttttcggcttggcaatttgtcactgatccagcccgggtatgtgtatgtcaataagtccagtacggcgggcaagggacatcgtcttcgcagtgtgagattcgcgggcatcctcgaaatcaacgacccgcaacggtttagcaaagcgttgattgccggcatcggccccgccaaagctttcggcttcggtctgatttcagtcgcactgacgggcaacggaacattgtgatgccctcaaatgtcacaccttgcaatagccgatctttgacaagtgaatatcaacttcggtttattactcatggccctagcgaccgaagaatgaaccatccggggtgtagacatgaaaaccagcctttttgaaatcggacgtttcgatgatcgcctttccttcctctacatcgatcgcgccatcatcaagcactctggcaatggcatcgcgatccatgaactggacggcgtgactgaagtgcctgtagcgtcgctctcactgctgatgcttggccccggcgtcagtatcacccatgaagccatcaaggcgctggcggacaacaactgcctgcttgtgtggtccggcgaattcggggttcggttttacgcctgcggcatgggcggtgcgcggcacagtcggaatcttttacggcaggcaaagctcgcactggatgaacgtacccgcctacaagtagtcgtccgaatgtactgcgctcgctttaccgatgagacgatcgatcccggcctgaccttgcagcagcttcgcggcaaggaaggcatccgcatgagacagacttacgcggatgcttcgaaggcgaccggcgtgccgtggctgggccgcaaatatgcccgcaaggactggttcgccggagatccagtgaaccgtgcactatccgccgccaatgcatgtctatacggcttggttcacgctgcgattctttccgctggctattcacccgccatcggctttattcacaccggcaaacaactctcgttcgtctatgacatagcggacctttacaaggcagagctgacgatcccactggcatttgagatcgctggaagacagccaaaggaactggaaagggatgttcgcaccgaggcgagacgtcgatttcatcagatgcacctgatgaagcggatcattcctgatatgcgaaagcttctgaatgttgaagcagaagagatggatgagtttgcaggagacgaggcgcgtcctgctgaattatggcagccaaagtcgttctccttggataccccgatcgggcagatattaacgcagcgcccagaaggagaggatgtcgcatgatggtgctgattgtccgaaatgtgcgccccgggctacgaggtcggttgactcgctggctcattcaaccgcagacaggtgtttacgtgggacacctgtcgggtcgtgtgcgggaagaactatggaagactgtctgtgatgaggttgatgagaatcgtggctccgcgatcctcatcaacccggcagccaatgagcagggctatacgatcctcactcgaggcgattccgatcgtagttttgtagacttggacgggcttatcctgccgaaaaccatgatttcggagtcgtaagccagtgatgtccccacgcatgtgggggtgaaccggcatgcccggcccggctgctgtcctggtgtttgatgtccccacgcatgtgggggtgaaccggcgtgaaggaatccaagccgcagcactacgccgatgtccccacgcatgtgggggtgaaccgaagggcaagaacaccaagattcccgtcaagaagatgtccccacgcatgtgggggtgaaccgctggggcgatgattgcgcccggccttcgccgcgatgtccccacgcatgtgggggtgaaccgaggaatacgcggacggtcgcggcggattccatgatgtccccacgcatgtgggggtgaaccggaaacgaacccttgcatcgtcatccccacaggcgatgtccccacgcatgtgggggtgaaccggcatgccc

SEQ ID NO: 1065 - DNA, 103860 bp, Artificial Sequence
  Synthetic Oligonucleotide
  misc_feature (1)..(94369): n is a, c, g, or t
nnnnnnnnnnnnnnnnnnnnnnnnnnnnnnnnnnnnnnnnnnnnnnnnnnnnnnnnnnnnnnnnnnnnnnnnnnnnnnnnnnnnnnnnnnnnnnnnnnnnnnnnnnnnnnnnnnnnnnnnnnnnnnnnnnnnnnnnnnnnnnnnnnnnnnnnnnnnnnnnnnnnnnnnnnnnnnnnnnnnnnnnnnnnnnnnnnnnnnnnnnnnnnnnnnnnnnnnnnnnnnnnnnnnnnnnnnnnnnnnnnnnnnnnnnnnnnnnnnnnnnnnnnnnnnnnnnnnnnnnnnnnnnnnnnnnnnnnnnnnnnnnnnnnnnnnnnnnnnnnnnnnnnnnnnnnnnnnnnnnnnnnnnnnnnnnnnnnnnnnnnnnnnnnnnnnnnnnnnnnnnnnnnnnnnnnnnnnnnnnnnnnnnnnnnnnnnnnnnnnnnnnnnnnnnnnnnnnnnnnnnnnnnnnnnnnnnnnnnnnnnnnnnnnnnnnnnnnnnnnnnnnnnnnnnnnnnnnnnnnnnnnnnnnnnnnnnnnnnnnnnnnnnnnnnnnnnnnnnnnnnnnnnnnnnnnnnnnnnnnnnnnnnnnnnnnnnnnnnnnnnnnnnnnnnnnnnnnnnnnnnnnnnnnnnnnnnnnnnnnnnnnnnnnnnnnnnnnnnnnnnnnnnnnnnnnnnnnnnnnnnnnnnnnnnnnnnnnnnnnnnnnnnnnnnnnnnnnnnnnnnnnnnnnnnnnnnnnnnnnnnnnnnnnnnnnnnnnnnnnnnnnnnnnnnnnnnnnnnnnnnnnnnnnnnnnnnnnnnnnnnnnnnnnnnnnnnnnnnnnnnnnnnnnnnnnnnnnnnnnnnnnnnnnnnnnnnnnnnnnnnnnnnnnnnnnnnnnnnnnnnnnnnnnnnnnnnnnnnnnnnnnnnnnnnnnnnnnnnnnnnnnnnnnnnnnnnnnnnnnnnnnnnnnnnnnnnnnnnnnnnnnnnnnnnnnnnnnnnnnnnnnnnnnnnnnnnnnnnnnnnnnnnnnnnnnnnnnnnnnnnnnnnnnnnnnnnnnnnnnnnnnnnnnnnnnnnnnnnnnnnnnnnnnnnnnnnnnnnnnnnnnnnnnnnnnnnnnnnnnnnnnnnnnnnnnnnnnnnnnnnnnnnnnnnnnnnnnnnnnnnnnnnnnnnnnnnnnnnnnnnnnnnnnnnnnnnnnnnnnnnnnnnnnnnnnnnnnnnnnnnnnnnnnnnnnnnnnnnnnnnnnnnnnnnnnnnnnnnnnnnnnnnnnnnnnnnnnnnnnnnnnnnnnnnnnnnnnnnnnnnnnnnnnnnnnnnnnnnnnnnnnnnnnnnnnnnnnnnnnnnnnnnnnnnnnnnnnnnnnnnnnnnnnnnnnnnnnnnnnnnnnnnnnnnnnnnnnnnnnnnnnnnnnnnnnnnnnnnnnnnnnnnnnnnnnnnnnnnnnnnnnnnnnnnnnnnnnnnnnnnnnnnnnnnnnnnnnnnnnnnnnnnnnnnnnnnnnnnnnnnnnnnnnnnnnnnnnnnnnnnnnnnnnnnnnnnnnnnnnnnnnnnnnnnnnnnnnnnnnnnnnnnnnnnnnnnnnnnnnnnnnnnnnnnnnnnnnnnnnnnnnnnnnnnnnnnnnnnnnnnnnnnnnnnnnnnnnnnnnnnnnnnnnnnnnnnnnnnnnnnnnnnnnnnnnnnnnnnnnnnnnnnnnnnnnnnnnnnnnnnnnnnnnnnnnnnnnnnnnnnnnnnnnnnnnnnnnnnnnnnnnnnnnnnnnnnnnnnnnnnnnnnnnnnnnnnnnnnnnnnnnnnnnnnnnnnnnnnnnnnnnnnnnnnnnnnnnnnnnnnnnnnnnnnnnnnnnnnnnnnnnnnnnnnnnnnnnnnnnnnnnnnnnnnnnnnnnnnnnnnnnnnnnnnnnnnnnnnnnnnnnnnnnnnnnnnnnnnnnnnnnnnnnnnnnnnnnnnnnnnnnnnnnnnnnnnnnnnnnnnnnnnnnnnnnnnnnnnnnnnnnnnnnnnnnnnnnnnnnnnnnnnnnnnnnnnnnnnnnnnnnnnnnnnnnnnnnnnnnnnnnnnnnnnnnnnnnnnnnnnnnnnnnnnnnnnnnnnnnnnnnnnnnnnnnnnnnnnnnnnnnnnnnnnnnnnnnnnnnnnnnnnnnnnnnnnnnnnnnnnnnnnnnnnnnnnnnnnnnnnnnnnnnnnnnnnnnnnnnnnnnnnnnnnnnnnnnnnnnnnnnnnnnnnnnnnnnnnnnnnnnnnnnnnnnnnnnnnnnnnnnnnnnnnnnnnnnnnnnnnnnnnnnnnnnnnnnnnnnnnnnnnnnnnnnnnnnnnnnnnnnnnnnnnnnnnnnnnnnnnnnnnnnnnnnnnnnnnnnnnnnnnnnnnnnnnnnnnnnnnnnnnnnnnnnnnnnnnnnnnnnnnnnnnnnnnnnnnnnnnnnnnnnnnnnnnnnnnnnnnnnnnnnnnnnnnnnnnnnnnnnnnnnnnnnnnnnnnnnnnnnnnnnnnnnnnnnnnnnnnnnnnnnnnnnnnnnnnnnnnnnnnnnnnnnnnnnnnnnnnnnnnnnnnnnnnnnnnnnnnnnnnnnnnnnnnnnnnnnnnnnnnnnnnnnnnnnnnnnnnnnnnnnnnnnnnnnnnnnnnnnnnnnnnnnnnnnnnnnnnnnnnnnnnnnnnnnnnnnnnnnnnnnnnnnnnnnnnnnnnnnnnnnnnnnnnnnnnnnnnnnnnnnnnnnnnnnnnnnnnnnnnnnnnnnnnnnnnnnnnnnnnnnnnnnnnnnnnnnnnnnnnnnnnnnnnnnnnnnnnnnnnnnnnnnnnnnnnnnnnnnnnnnnnnnnnnnnnnnnnnnnnnnnnnnnnnnnnnnnnnnnnnnnnnnnnnnnnnnnnnnnnnnnnnnnnnnnnnnnnnnnnnnnnnnnnnnnnnnnnnnnnnnnnnnnnnnnnnnnnnnnnnnnnnnnnnnnnnnnnnnnnnnnnnnnnnnnnnnnnnnnnnnnnnnnnnnnnnnnnnnnnnnnnnnnnnnnnnnnnnnnnnnnnnnnnnnnnnnnnnnnnnnnnnnnnnnnnnnnnnnnnnnnnnnnnnnnnnnnnnnnnnnnnnnnnnnnnnnnnnnnnnnnnnnnnnnnnnnnnnnnnnnnnnnnnnnnnnnnnnnnnnnnnnnnnnnnnnnnnnnnnnnnnnnnnnnnnnnnnnnnnnnnnnnnnnnnnnnnnnnnnnnnnnnnnnnnnnnnnnnnnnnnnnnnnnnnnnnnnnnnnnnnnnnnnnnnnnnnnnnnnnnnnnnnnnnnnnnnnnnnnnnnnnnnnnnnnnnnnnnnnnnnnnnnnnnnnnnnnnnnnnnnnnnnnnnnnnnnnnnnnnnnnnnnnnnnnnnnnnnnnnnnnnnnnnnnnnnnnnnnnnnnnnnnnnnnnnnnnnnnnnnnnnnnnnnnnnnnnnnnnnnnnnnnnnnnnnnnnnnnnnnnnnnnnnnnnnnnnnnnnnnnnnnnnnnnnnnnnnnnnnnnnnnnnnnnnnnnnnnnnnnnnnnnnnnnnnnnnnnnnnnnnnnnnnnnnnnnnnnnnnnnnnnnnnnnnnnnnnnnnnnnnnnnnnnnnnnnnnnnnnnnnnnnnnnnnnnnnnnnnnnnnnnnnnnnnnnnnnnnnnnnnnnnnnnnnnnnnnnnnnnnnnnnnnnnnnnnnnnnnnnnnnnnnnnnnnnnnnnnnnnnnnnnnnnnnnnnnnnnnnnnnnnnnnnnnnnnnnnnnnnnnnnnnnnnnnnnnnnnnnnnnnnnnnnnnnnnnnnnnnnnnnnnnnnnnnnnnnnnnnnnnnnnnnnnnnnnnnnnnnnnnnnnnnnnnnnnnnnnnnnnnnnnnnnnnnnnnnnnnnnnnnnnnnnnnnnnnnnnnnnnnnnnnnnnnnnnnnnnnnnnnnnnnnnnnnnnnnnnnnnnnnnnnnnnnnnnnnnnnnnnnnnnnnnnnnnnnnnnnnnnnnnnnnnnnnnnnnnnnnnnnnnnnnnnnnnnnnnnnnnnnnnnnnnnnnnnnnnnnnnnnnnnnnnnnnnnnnnnnnnnnnnnnnnnnnnnnnnnnnnnnnnnnnnnnnnnnnnnnnnnnnnnnnnnnnnnnnnnnnnnnnnnnnnnnnnnnnnnnnnnnnnnnnnnnnnnnnnnnnnnnnnnnnnnnnnnnnnnnnnnnnnnnnnnnnnnnnnnnnnnnnnnnnnnnnnnnnnnnnnnnnnnnnnnnnnnnnnnnnnnnnnnnnnnnnnnnnnnnnnnnnnnnnnnnnnnnnnnnnnnnnnnnnnnnnnnnnnnnnnnnnnnnnnnnnnnnnnnnnnnnnnnnnnnnnnnnnnnnnnnnnnnnnnnnnnnnnnnnnnnnnnnnnnnnnnnnnnnnnnnnnnnnnnnnnnnnnnnnnnnnnnnnnnnnnnnnnnnnnnnnnnnnnnnnnnnnnnnnnnnnnnnnnnnnnnnnnnnnnnnnnnnnnnnnnnnnnnnnnnnnnnnnnnnnnnnnnnnnnnnnnnnnnnnnnnnnnnnnnnnnnnnnnnnnnnnnnnnnnnnnnnnnnnnnnnnnnnnnnnnnnnnnnnnnnnnnnnnnnnnnnnnnnnnnnnnnnnnnnnnnnnnnnnnnnnnnnnnnnnnnnnnnnnnnnnnnnnnnnnnnnnnnnnnnnnnnnnnnnnnnnnnnnnnnnnnnnnnnnnnnnnnnnnnnnnnnnnnnnnnnnnnnnnnnnnnnnnnnnnnnnnnnnnnnnnnnnnnnnnnnnnnnnnnnnnnnnnnnnnnnnnnnnnnnnnnnnnnnnnnnnnnnnnnnnnnnnnnnnnnnnnnnnnnnnnnnnnnnnnnnnnnnnnnnnnnnnnnnnnnnnnnnnnnnnnnnnnnnnnnnnnnnnnnnnnnnnnnnnnnnnnnnnnnnnnnnnnnnnnnnnnnnnnnnnnnnnnnnnnnnnnnnnnnnnnnnnnnnnnnnnnnnnnnnnnnnnnnnnnnnnnnnnnnnnnnnnnnnnnnnnnnnnnnnnnnnnnnnnnnnnnnnnnnnnnnnnnnnnnnnnnnnnnnnnnnnnnnnnnnnnnnnnnnnnnnnnnnnnnnnnnnnnnnnnnnnnnnnnnnnnnnnnnnnnnnnnnnnnnnnnnnnnnnnnnnnnnnnnnnnnnnnnnnnnnnnnnnnnnnnnnnnnnnnnnnnnnnnnnnnnnnnnnnnnnnnnnnnnnnnnnnnnnnnnnnnnnnnnnnnnnnnnnnnnnnnnnnnnnnnnnnnnnnnnnnnnnnnnnnnnnnnnnnnnnnnnnnnnnnnnnnnnnnnnnnnnnnnnnnnnnnnnnnnnnnnnnnnnnnnnnnnnnnnnnnnnnnnnnnnnnnnnnnnnnnnnnnnnnnnnnnnnnnnnnnnnnnnnnnnnnnnnnnnnnnnnnnnnnnnnnnnnnnnnnnnnnnnnnnnnnnnnnnnnnnnnnnnnnnnnnnnnnnnnnnnnnnnnnnnnnnnnnnnnnnnnnnnnnnnnnnnnnnnnnnnnnnnnnnnnnnnnnnnnnnnnnnnnnnnnnnnnnnnnnnnnnnnnnnnnnnnnnnnnnnnnnnnnnnnnnnnnnnnnnnnnnnnnnnnnnnnnnnnnnnnnnnnnnnnnnnnnnnnnnnnnnnnnnnnnnnnnnnnnnnnnnnnnnnnnnnnnnnnnnnnnnnnnnnnnnnnnnnnnnnnnnnnnnnnnnnnnnnnnnnnnnnnnnnnnnnnnnnnnnnnnnnnnnnnnnnnnnnnnnnnnnnnnnnnnnnnnnnnnnnnnnnnnnnnnnnnnnnnnnnnnnnnnnnnnnnnnnnnnnnnnnnnnnnnnnnnnnnnnnnnnnnnnnnnnnnnnnnnnnnnnnnnnnnnnnnnnnnnnnnnnnnnnnnnnnnnnnnnnnnnnnnnnnnnnnnnnnnnnnnnnnnnnnnnnnnnnnnnnnnnnnnnnnnnnnnnnnnnnnnnnnnnnnnnnnnnnnnnnnnnnnnnnnnnnnnnnnnnnnnnnnnnnnnnnnnnnnnnnnnnnnnnnnnnnnnnnnnnnnnnnnnnnnnnnnnnnnnnnnnnnnnnnnnnnnnnnnnnnnnnnnnnnnnnnnnnnnnnnnnnnnnnnnnnnnnnnnnnnnnnnnnnnnnnnnnnnnnnnnnnnnnnnnnnnnnnnnnnnnnnnnnnnnnnnnnnnnnnnnnnnnnnnnnnnnnnnnnnnnnnnnnnnnnnnnnnnnnnnnnnnnnnnnnnnnnnnnnnnnnnnnnnnnnnnnnnnnnnnnnnnnnnnnnnnnnnnnnnnnnnnnnnnnnnnnnnnnnnnnnnnnnnnnnnnnnnnnnnnnnnnnnnnnnnnnnnnnnnnnnnnnnnnnnnnnnnnnnnnnnnnnnnnnnnnnnnnnnnnnnnnnnnnnnnnnnnnnnnnnnnnnnnnnnnnnnnnnnnnnnnnnnnnnnnnnnnnnnnnnnnnnnnnnnnnnnnnnnnnnnnnnnnnnnnnnnnnnnnnnnnnnnnnnnnnnnnnnnnnnnnnnnnnnnnnnnnnnnnnnnnnnnnnnnnnnnnnnnnnnnnnnnnnnnnnnnnnnnnnnnnnnnnnnnnnnnnnnnnnnnnnnnnnnnnnnnnnnnnnnnnnnnnnnnnnnnnnnnnnnnnnnnnnnnnnnnnnnnnnnnnnnnnnnnnnnnnnnnnnnnnnnnnnnnnnnnnnnnnnnnnnnnnnnnnnnnnnnnnnnnnnnnnnnnnnnnnnnnnnnnnnnnnnnnnnnnnnnnnnnnnnnnnnnnnnnnnnnnnnnnnnnnnnnnnnnnnnnnnnnnnnnnnnnnnnnnnnnnnnnnnnnnnnnnnnnnnnnnnnnnnnnnnnnnnnnnnnnnnnnnnnnnnnnnnnnnnnnnnnnnnnnnnnnnnnnnnnnnnnnnnnnnnnnnnnnnnnnnnnnnnnnnnnnnnnnnnnnnnnnnnnnnnnnnnnnnnnnnnnnnnnnnnnnnnnnnnnnnnnnnnnnnnnnnnnnnnnnnnnnnnnnnnnnnnnnnnnnnnnnnnnnnnnnnnnnnnnnnnnnnnnnnnnnnnnnnnnnnnnnnnnnnnnnnnnnnnnnnnnnnnnnnnnnnnnnnnnnnnnnnnnnnnnnnnnnnnnnnnnnnnnnnnnnnnnnnnnnnnnnnnnnnnnnnnnnnnnnnnnnnnnnnnnnnnnnnnnnnnnnnnnnnnnnnnnnnnnnnnnnnnnnnnnnnnnnnnnnnnnnnnnnnnnnnnnnnnnnnnnnnnnnnnnnnnnnnnnnnnnnnnnnnnnnnnnnnnnnnnnnnnnnnnnnnnnnnnnnnnnnnnnnnnnnnnnnnnnnnnnnnnnnnnnnnnnnnnnnnnnnnnnnnnnnnnnnnnnnnnnnnnnnnnnnnnnnnnnnnnnnnnnnnnnnnnnnnnnnnnnnnnnnnnnnnnnnnnnnnnnnnnnnnnnnnnnnnnnnnnnnnnnnnnnnnnnnnnnnnnnnnnnnnnnnnnnnnnnnnnnnnnnnnnnnnnnnnnnnnnnnnnnnnnnnnnnnnnnnnnnnnnnnnnnnnnnnnnnnnnnnnnnnnnnnnnnnnnnnnnnnnnnnnnnnnnnnnnnnnnnnnnnnnnnnnnnnnnnnnnnnnnnnnnnnnnnnnnnnnnnnnnnnnnnnnnnnnnnnnnnnnnnnnnnnnnnnnnnnnnnnnnnnnnnnnnnnnnnnnnnnnnnnnnnnnnnnnnnnnnnnnnnnnnnnnnnnnnnnnnnnnnnnnnnnnnnnnnnnnnnnnnnnnnnnnnnnnnnnnnnnnnnnnnnnnnnnnnnnnnnnnnnnnnnnnnnnnnnnnnnnnnnnnnnnnnnnnnnnnnnnnnnnnnnnnnnnnnnnnnnnnnnnnnnnnnnnnnnnnnnnnnnnnnnnnnnnnnnnnnnnnnnnnnnnnnnnnnnnnnnnnnnnnnnnnnnnnnnnnnnnnnnnnnnnnnnnnnnnnnnnnnnnnnnnnnnnnnnnnnnnnnnnnnnnnnnnnnnnnnnnnnnnnnnnnnnnnnnnnnnnnnnnnnnnnnnnnnnnnnnnnnnnnnnnnnnnnnnnnnnnnnnnnnnnnnnnnnnnnnnnnnnnnnnnnnnnnnnnnnnnnnnnnnnnnnnnnnnnnnnnnnnnnnnnnnnnnnnnnnnnnnnnnnnnnnnnnnnnnnnnnnnnnnnnnnnnnnnnnnnnnnnnnnnnnnnnnnnnnnnnnnnnnnnnnnnnnnnnnnnnnnnnnnnnnnnnnnnnnnnnnnnnnnnnnnnnnnnnnnnnnnnnnnnnnnnnnnnnnnnnnnnnnnnnnnnnnnnnnnnnnnnnnnnnnnnnnnnnnnnnnnnnnnnnnnnnnnnnnnnnnnnnnnnnnnnnnnnnnnnnnnnnnnnnnnnnnnnnnnnnnnnnnnnnnnnnnnnnnnnnnnnnnnnnnnnnnnnnnnnnnnnnnnnnnnnnnnnnnnnnnnnnnnnnnnnnnnnnnnnnnnnnnnnnnnnnnnnnnnnnnnnnnnnnnnnnnnnnnnnnnnnnnnnnnnnnnnnnnnnnnnnnnnnnnnnnnnnnnnnnnnnnnnnnnnnnnnnnnnnnnnnnnnnnnnnnnnnnnnnnnnnnnnnnnnnnnnnnnnnnnnnnnnnnnnnnnnnnnnnnnnnnnnnnnnnnnnnnnnnnnnnnnnnnnnnnnnnnnnnnnnnnnnnnnnnnnnnnnnnnnnnnnnnnnnnnnnnnnnnnnnnnnnnnnnnnnnnnnnnnnnnnnnnnnnnnnnnnnnnnnnnnnnnnnnnnnnnnnnnnnnnnnnnnnnnnnnnnnnnnnnnnnnnnnnnnnnnnnnnnnnnnnnnnnnnnnnnnnnnnnnnnnnnnnnnnnnnnnnnnnnnnnnnnnnnnnnnnnnnnnnnnnnnnnnnnnnnnnnnnnnnnnnnnnnnnnnnnnnnnnnnnnnnnnnnnnnnnnnnnnnnnnnnnnnnnnnnnnnnnnnnnnnnnnnnnnnnnnnnnnnnnnnnnnnnnnnnnnnnnnnnnnnnnnnnnnnnnnnnnnnnnnnnnnnnnnnnnnnnnnnnnnnnnnnnnnnnnnnnnnnnnnnnnnnnnnnnnnnnnnnnnnnnnnnnnnnnnnnnnnnnnnnnnnnnnnnnnnnnnnnnnnnnnnnnnnnnnnnnnnnnnnnnnnnnnnnnnnnnnnnnnnnnnnnnnnnnnnnnnnnnnnnnnnnnnnnnnnnnnnnnnnnnnnnnnnnnnnnnnnnnnnnnnnnnnnnnnnnnnnnnnnnnnnnnnnnnnnnnnnnnnnnnnnnnnnnnnnnnnnnnnnnnnnnnnnnnnnnnnnnnnnnnnnnnnnnnnnnnnnnnnnnnnnnnnnnnnnnnnnnnnnnnnnnnnnnnnnnnnnnnnnnnnnnnnnnnnnnnnnnnnnnnnnnnnnnnnnnnnnnnnnnnnnnnnnnnnnnnnnnnnnnnnnnnnnnnnnnnnnnnnnnnnnnnnnnnnnnnnnnnnnnnnnnnnnnnnnnnnnnnnnnnnnnnnnnnnnnnnnnnnnnnnnnnnnnnnnnnnnnnnnnnnnnnnnnnnnnnnnnnnnnnnnnnnnnnnnnnnnnnnnnnnnnnnnnnnnnnnnnnnnnnnnnnnnnnnnnnnnnnnnnnnnnnnnnnnnnnnnnnnnnnnnnnnnnnnnnnnnnnnnnnnnnnnnnnnnnnnnnnnnnnnnnnnnnnnnnnnnnnnnnnnnnnnnnnnnnnnnnnnnnnnnnnnnnnnnnnnnnnnnnnnnnnnnnnnnnnnnnnnnnnnnnnnnnnnnnnnnnnnnnnnnnnnnnnnnnnnnnnnnnnnnnnnnnnnnnnnnnnnnnnnnnnnnnnnnnnnnnnnnnnnnnnnnnnnnnnnnnnnnnnnnnnnnnnnnnnnnnnnnnnnnnnnnnnnnnnnnnnnnnnnnnnnnnnnnnnnnnnnnnnnnnnnnnnnnnnnnnnnnnnnnnnnnnnnnnnnnnnnnnnnnnnnnnnnnnnnnnnnnnnnnnnnnnnnnnnnnnnnnnnnnnnnnnnnnnnnnnnnnnnnnnnnnnnnnnnnnnnnnnnnnnnnnnnnnnnnnnnnnnnnnnnnnnnnnnnnnnnnnnnnnnnnnnnnnnnnnnnnnnnnnnnnnnnnnnnnnnnnnnnnnnnnnnnnnnnnnnnnnnnnnnnnnnnnnnnnnnnnnnnnnnnnnnnnnnnnnnnnnnnnnnnnnnnnnnnnnnnnnnnnnnnnnnnnnnnnnnnnnnnnnnnnnnnnnnnnnnnnnnnnnnnnnnnnnnnnnnnnnnnnnnnnnnnnnnnnnnnnnnnnnnnnnnnnnnnnnnnnnnnnnnnnnnnnnnnnnnnnnnnnnnnnnnnnnnnnnnnnnnnnnnnnnnnnnnnnnnnnnnnnnnnnnnnnnnnnnnnnnnnnnnnnnnnnnnnnnnnnnnnnnnnnnnnnnnnnnnnnnnnnnnnnnnnnnnnnnnnnnnnnnnnnnnnnnnnnnnnnnnnnnnnnnnnnnnnnnnnnnnnnnnnnnnnnnnnnnnnnnnnnnnnnnnnnnnnnnnnnnnnnnnnnnnnnnnnnnnnnnnnnnnnnnnnnnnnnnnnnnnnnnnnnnnnnnnnnnnnnnnnnnnnnnnnnnnnnnnnnnnnnnnnnnnnnnnnnnnnnnnnnnnnnnnnnnnnnnnnnnnnnnnnnnnnnnnnnnnnnnnnnnnnnnnnnnnnnnnnnnnnnnnnnnnnnnnnnnnnnnnnnnnnnnnnnnnnnnnnnnnnnnnnnnnnnnnnnnnnnnnnnnnnnnnnnnnnnnnnnnnnnnnnnnnnnnnnnnnnnnnnnnnnnnnnnnnnnnnnnnnnnnnnnnnnnnnnnnnnnnnnnnnnnnnnnnnnnnnnnnnnnnnnnnnnnnnnnnnnnnnnnnnnnnnnnnnnnnnnnnnnnnnnnnnnnnnnnnnnnnnnnnnnnnnnnnnnnnnnnnnnnnnnnnnnnnnnnnnnnnnnnnnnnnnnnnnnnnnnnnnnnnnnnnnnnnnnnnnnnnnnnnnnnnnnnnnnnnnnnnnnnnnnnnnnnnnnnnnnnnnnnnnnnnnnnnnnnnnnnnnnnnnnnnnnnnnnnnnnnnnnnnnnnnnnnnnnnnnnnnnnnnnnnnnnnnnnnnnnnnnnnnnnnnnnnnnnnnnnnnnnnnnnnnnnnnnnnnnnnnnnnnnnnnnnnnnnnnnnnnnnnnnnnnnnnnnnnnnnnnnnnnnnnnnnnnnnnnnnnnnnnnnnnnnnnnnnnnnnnnnnnnnnnnnnnnnnnnnnnnnnnnnnnnnnnnnnnnnnnnnnnnnnnnnnnnnnnnnnnnnnnnnnnnnnnnnnnnnnnnnnnnnnnnnnnnnnnnnnnnnnnnnnnnnnnnnnnnnnnnnnnnnnnnnnnnnnnnnnnnnnnnnnnnnnnnnnnnnnnnnnnnnnnnnnnnnnnnnnnnnnnnnnnnnnnnnnnnnnnnnnnnnnnnnnnnnnnnnnnnnnnnnnnnnnnnnnnnnnnnnnnnnnnnnnnnnnnnnnnnnnnnnnnnnnnnnnnnnnnnnnnnnnnnnnnnnnnnnnnnnnnnnnnnnnnnnnnnnnnnnnnnnnnnnnnnnnnnnnnnnnnnnnnnnnnnnnnnnnnnnnnnnnnnnnnnnnnnnnnnnnnnnnnnnnnnnnnnnnnnnnnnnnnnnnnnnnnnnnnnnnnnnnnnnnnnnnnnnnnnnnnnnnnnnnnnnnnnnnnnnnnnnnnnnnnnnnnnnnnnnnnnnnnnnnnnnnnnnnnnnnnnnnnnnnnnnnnnnnnnnnnnnnnnnnnnnnnnnnnnnnnnnnnnnnnnnnnnnnnnnnnnnnnnnnnnnnnnnnnnnnnnnnnnnnnnnnnnnnnnnnnnnnnnnnnnnnnnnnnnnnnnnnnnnnnnnnnnnnnnnnnnnnnnnnnnnnnnnnnnnnnnnnnnnnnnnnnnnnnnnnnnnnnnnnnnnnnnnnnnnnnnnnnnnnnnnnnnnnnnnnnnnnnnnnnnnnnnnnnnnnnnnnnnnnnnnnnnnnnnnnnnnnnnnnnnnnnnnnnnnnnnnnnnnnnnnnnnnnnnnnnnnnnnnnnnnnnnnnnnnnnnnnnnnnnnnnnnnnnnnnnnnnnnnnnnnnnnnnnnnnnnnnnnnnnnnnnnnnnnnnnnnnnnnnnnnnnnnnnnnnnnnnnnnnnnnnnnnnnnnnnnnnnnnnnnnnnnnnnnnnnnnnnnnnnnnnnnnnnnnnnnnnnnnnnnnnnnnnnnnnnnnnnnnnnnnnnnnnnnnnnnnnnnnnnnnnnnnnnnnnnnnnnnnnnnnnnnnnnnnnnnnnnnnnnnnnnnnnnnnnnnnnnnnnnnnnnnnnnnnnnnnnnnnnnnnnnnnnnnnnnnnnnnnnnnnnnnnnnnnnnnnnnnnnnnnnnnnnnnnnnnnnnnnnnnnnnnnnnnnnnnnnnnnnnnnnnnnnnnnnnnnnnnnnnnnnnnnnnnnnnnnnnnnnnnnnnnnnnnnnnnnnnnnnnnnnnnnnnnnnnnnnnnnnnnnnnnnnnnnnnnnnnnnnnnnnnnnnnnnnnnnnnnnnnnnnnnnnnnnnnnnnnnnnnnnnnnnnnnnnnnnnnnnnnnnnnnnnnnnnnnnnnnnnnnnnnnnnnnnnnnnnnnnnnnnnnnnnnnnnnnnnnnnnnnnnnnnnnnnnnnnnnnnnnnnnnnnnnnnnnnnnnnnnnnnnnnnnnnnnnnnnnnnnnnnnnnnnnnnnnnnnnnnnnnnnnnnnnnnnnnnnnnnnnnnnnnnnnnnnnnnnnnnnnnnnnnnnnnnnnnnnnnnnnnnnnnnnnnnnnnnnnnnnnnnnnnnnnnnnnnnnnnnnnnnnnnnnnnnnnnnnnnnnnnnnnnnnnnnnnnnnnnnnnnnnnnnnnnnnnnnnnnnnnnnnnnnnnnnnnnnnnnnnnnnnnnnnnnnnnnnnnnnnnnnnnnnnnnnnnnnnnnnnnnnnnnnnnnnnnnnnnnnnnnnnnnnnnnnnnnnnnnnnnnnnnnnnnnnnnnnnnnnnnnnnnnnnnnnnnnnnnnnnnnnnnnnnnnnnnnnnnnnnnnnnnnnnnnnnnnnnnnnnnnnnnnnnnnnnnnnnnnnnnnnnnnnnnnnnnnnnnnnnnnnnnnnnnnnnnnnnnnnnnnnnnnnnnnnnnnnnnnnnnnnnnnnnnnnnnnnnnnnnnnnnnnnnnnnnnnnnnnnnnnnnnnnnnnnnnnnnnnnnnnnnnnnnnnnnnnnnnnnnnnnnnnnnnnnnnnnnnnnnnnnnnnnnnnnnnnnnnnnnnnnnnnnnnnnnnnnnnnnnnnnnnnnnnnnnnnnnnnnnnnnnnnnnnnnnnnnnnnnnnnnnnnnnnnnnnnnnnnnnnnnnnnnnnnnnnnnnnnnnnnnnnnnnnnnnnnnnnnnnnnnnnnnnnnnnnnnnnnnnnnnnnnnnnnnnnnnnnnnnnnnnnnnnnnnnnnnnnnnnnnnnnnnnnnnnnnnnnnnnnnnnnnnnnnnnnnnnnnnnnnnnnnnnnnnnnnnnnnnnnnnnnnnnnnnnnnnnnnnnnnnnnnnnnnnnnnnnnnnnnnnnnnnnnnnnnnnnnnnnnnnnnnnnnnnnnnnnnnnnnnnnnnnnnnnnnnnnnnnnnnnnnnnnnnnnnnnnnnnnnnnnnnnnnnnnnnnnnnnnnnnnnnnnnnnnnnnnnnnnnnnnnnnnnnnnnnnnnnnnnnnnnnnnnnnnnnnnnnnnnnnnnnnnnnnnnnnnnnnnnnnnnnnnnnnnnnnnnnnnnnnnnnnnnnnnnnnnnnnnnnnnnnnnnnnnnnnnnnnnnnnnnnnnnnnnnnnnnnnnnnnnnnnnnnnnnnnnnnnnnnnnnnnnnnnnnnnnnnnnnnnnnnnnnnnnnnnnnnnnnnnnnnnnnnnnnnnnnnnnnnnnnnnnnnnnnnnnnnnnnnnnnnnnnnnnnnnnnnnnnnnnnnnnnnnnnnnnnnnnnnnnnnnnnnnnnnnnnnnnnnnnnnnnnnnnnnnnnnnnnnnnnnnnnnnnnnnnnnnnnnnnnnnnnnnnnnnnnnnnnnnnnnnnnnnnnnnnnnnnnnnnnnnnnnnnnnnnnnnnnnnnnnnnnnnnnnnnnnnnnnnnnnnnnnnnnnnnnnnnnnnnnnnnnnnnnnnnnnnnnnnnnnnnnnnnnnnnnnnnnnnnnnnnnnnnnnnnnnnnnnnnnnnnnnnnnnnnnnnnnnnnnnnnnnnnnnnnnnnnnnnnnnnnnnnnnnnnnnnnnnnnnnnnnnnnnnnnnnnnnnnnnnnnnnnnnnnnnnnnnnnnnnnnnnnnnnnnnnnnnnnnnnnnnnnnnnnnnnnnnnnnnnnnnnnnnnnnnnnnnnnnnnnnnnnnnnnnnnnnnnnnnnnnnnnnnnnnnnnnnnnnnnnnnnnnnnnnnnnnnnnnnnnnnnnnnnnnnnnnnnnnnnnnnnnnnnnnnnnnnnnnnnnnnnnnnnnnnnnnnnnnnnnnnnnnnnnnnnnnnnnnnnnnnnnnnnnnnnnnnnnnnnnnnnnnnnnnnnnnnnnnnnnnnnnnnnnnnnnnnnnnnnnnnnnnnnnnnnnnnnnnnnnnnnnnnnnnnnnnnnnnnnnnnnnnnnnnnnnnnnnnnnnnnnnnnnnnnnnnnnnnnnnnnnnnnnnnnnnnnnnnnnnnnnnnnnnnnnnnnnnnnnnnnnnnnnnnnnnnnnnnnnnnnnnnnnnnnnnnnnnnnnnnnnnnnnnnnnnnnnnnnnnnnnnnnnnnnnnnnnnnnnnnnnnnnnnnnnnnnnnnnnnnnnnnnnnnnnnnnnnnnnnnnnnnnnnnnnnnnnnnnnnnnnnnnnnnnnnnnnnnnnnnnnnnnnnnnnnnnnnnnnnnnnnnnnnnnnnnnnnnnnnnnnnnnnnnnnnnnnnnnnnnnnnnnnnnnnnnnnnnnnnnnnnnnnnnnnnnnnnnnnnnnnnnnnnnnnnnnnnnnnnnnnnnnnnnnnnnnnnnnnnnnnnnnnnnnnnnnnnnnnnnnnnnnnnnnnnnnnnnnnnnnnnnnnnnnnnnnnnnnnnnnnnnnnnnnnnnnnnnnnnnnnnnnnnnnnnnnnnnnnnnnnnnnnnnnnnnnnnnnnnnnnnnnnnnnnnnnnnnnnnnnnnnnnnnnnnnnnnnnnnnnnnnnnnnnnnnnnnnnnnnnnnnnnnnnnnnnnnnnnnnnnnnnnnnnnnnnnnnnnnnnnnnnnnnnnnnnnnnnnnnnnnnnnnnnnnnnnnnnnnnnnnnnnnnnnnnnnnnnnnnnnnnnnnnnnnnnnnnnnnnnnnnnnnnnnnnnnnnnnnnnnnnnnnnnnnnnnnnnnnnnnnnnnnnnnnnnnnnnnnnnnnnnnnnnnnnnnnnnnnnnnnnnnnnnnnnnnnnnnnnnnnnnnnnnnnnnnnnnnnnnnnnnnnnnnnnnnnnnnnnnnnnnnnnnnnnnnnnnnnnnnnnnnnnnnnnnnnnnnnnnnnnnnnnnnnnnnnnnnnnnnnnnnnnnnnnnnnnnnnnnnnnnnnnnnnnnnnnnnnnnnnnnnnnnnnnnnnnnnnnnnnnnnnnnnnnnnnnnnnnnnnnnnnnnnnnnnnnnnnnnnnnnnnnnnnnnnnnnnnnnnnnnnnnnnnnnnnnnnnnnnnnnnnnnnnnnnnnnnnnnnnnnnnnnnnnnnnnnnnnnnnnnnnnnnnnnnnnnnnnnnnnnnnnnnnnnnnnnnnnnnnnnnnnnnnnnnnnnnnnnnnnnnnnnnnnnnnnnnnnnnnnnnnnnnnnnnnnnnnnnnnnnnnnnnnnnnnnnnnnnnnnnnnnnnnnnnnnnnnnnnnnnnnnnnnnnnnnnnnnnnnnnnnnnnnnnnnnnnnnnnnnnnnnnnnnnnnnnnnnnnnnnnnnnnnnnnnnnnnnnnnnnnnnnnnnnnnnnnnnnnnnnnnnnnnnnnnnnnnnnnnnnnnnnnnnnnnnnnnnnnnnnnnnnnnnnnnnnnnnnnnnnnnnnnnnnnnnnnnnnnnnnnnnnnnnnnnnnnnnnnnnnnnnnnnnnnnnnnnnnnnnnnnnnnnnnnnnnnnnnnnnnnnnnnnnnnnnnnnnnnnnnnnnnnnnnnnnnnnnnnnnnnnnnnnnnnnnnnnnnnnnnnnnnnnnnnnnnnnnnnnnnnnnnnnnnnnnnnnnnnnnnnnnnnnnnnnnnnnnnnnnnnnnnnnnnnnnnnnnnnnnnnnnnnnnnnnnnnnnnnnnnnnnnnnnnnnnnnnnnnnnnnnnnnnnnnnnnnnnnnnnnnnnnnnnnnnnnnnnnnnnnnnnnnnnnnnnnnnnnnnnnnnnnnnnnnnnnnnnnnnnnnnnnnnnnnnnnnnnnnnnnnnnnnnnnnnnnnnnnnnnnnnnnnnnnnnnnnnnnnnnnnnnnnnnnnnnnnnnnnnnnnnnnnnnnnnnnnnnnnnnnnnnnnnnnnnnnnnnnnnnnnnnnnnnnnnnnnnnnnnnnnnnnnnnnnnnnnnnnnnnnnnnnnnnnnnnnnnnnnnnnnnnnnnnnnnnnnnnnnnnnnnnnnnnnnnnnnnnnnnnnnnnnnnnnnnnnnnnnnnnnnnnnnnnnnnnnnnnnnnnnnnnnnnnnnnnnnnnnnnnnnnnnnnnnnnnnnnnnnnnnnnnnnnnnnnnnnnnnnnnnnnnnnnnnnnnnnnnnnnnnnnnnnnnnnnnnnnnnnnnnnnnnnnnnnnnnnnnnnnnnnnnnnnnnnnnnnnnnnnnnnnnnnnnnnnnnnnnnnnnnnnnnnnnnnnnnnnnnnnnnnnnnnnnnnnnnnnnnnnnnnnnnnnnnnnnnnnnnnnnnnnnnnnnnnnnnnnnnnnnnnnnnnnnnnnnnnnnnnnnnnnnnnnnnnnnnnnnnnnnnnnnnnnnnnnnnnnnnnnnnnnnnnnnnnnnnnnnnnnnnnnnnnnnnnnnnnnnnnnnnnnnnnnnnnnnnnnnnnnnnnnnnnnnnnnnnnnnnnnnnnnnnnnnnnnnnnnnnnnnnnnnnnnnnnnnnnnnnnnnnnnnnnnnnnnnnnnnnnnnnnnnnnnnnnnnnnnnnnnnnnnnnnnnnnnnnnnnnnnnnnnnnnnnnnnnnnnnnnnnnnnnnnnnnnnnnnnnnnnnnnnnnnnnnnnnnnnnnnnnnnnnnnnnnnnnnnnnnnnnnnnnnnnnnnnnnnnnnnnnnnnnnnnnnnnnnnnnnnnnnnnnnnnnnnnnnnnnnnnnnnnnnnnnnnnnnnnnnnnnnnnnnnnnnnnnnnnnnnnnnnnnnnnnnnnnnnnnnnnnnnnnnnnnnnnnnnnnnnnnnnnnnnnnnnnnnnnnnnnnnnnnnnnnnnnnnnnnnnnnnnnnnnnnnnnnnnnnnnnnnnnnnnnnnnnnnnnnnnnnnnnnnnnnnnnnnnnnnnnnnnnnnnnnnnnnnnnnnnnnnnnnnnnnnnnnnnnnnnnnnnnnnnnnnnnnnnnnnnnnnnnnnnnnnnnnnnnnnnnnnnnnnnnnnnnnnnnnnnnnnnnnnnnnnnnnnnnnnnnnnnnnnnnnnnnnnnnnnnnnnnnnnnnnnnnnnnnnnnnnnnnnnnnnnnnnnnnnnnnnnnnnnnnnnnnnnnnnnnnnnnnnnnnnnnnnnnnnnnnnnnnnnnnnnnnnnnnnnnnnnnnnnnnnnnnnnnnnnnnnnnnnnnnnnnnnnnnnnnnnnnnnnnnnnnnnnnnnnnnnnnnnnnnnnnnnnnnnnnnnnnnnnnnnnnnnnnnnnnnnnnnnnnnnnnnnnnnnnnnnnnnnnnnnnnnnnnnnnnnnnnnnnnnnnnnnnnnnnnnnnnnnnnnnnnnnnnnnnnnnnnnnnnnnnnnnnnnnnnnnnnnnnnnnnnnnnnnnnnnnnnnnnnnnnnnnnnnnnnnnnnnnnnnnnnnnnnnnnnnnnnnnnnnnnnnnnnnnnnnnnnnnnnnnnnnnnnnnnnnnnnnnnnnnnnnnnnnnnnnnnnnnnnnnnnnnnnnnnnnnnnnnnnnnnnnnnnnnnnnnnnnnnnnnnnnnnnnnnnnnnnnnnnnnnnnnnnnnnnnnnnnnnnnnnnnnnnnnnnnnnnnnnnnnnnnnnnnnnnnnnnnnnnnnnnnnnnnnnnnnnnnnnnnnnnnnnnnnnnnnnnnnnnnnnnnnnnnnnnnnnnnnnnnnnnnnnnnnnnnnnnnnnnnnnnnnnnnnnnnnnnnnnnnnnnnnnnnnnnnnnnnnnnnnnnnnnnnnnnnnnnnnnnnnnnnnnnnnnnnnnnnnnnnnnnnnnnnnnnnnnnnnnnnnnnnnnnnnnnnnnnnnnnnnnnnnnnnnnnnnnnnnnnnnnnnnnnnnnnnnnnnnnnnnnnnnnnnnnnnnnnnnnnnnnnnnnnnnnnnnnnnnnnnnnnnnnnnnnnnnnnnnnnnnnnnnnnnnnnnnnnnnnnnnnnnnnnnnnnnnnnnnnnnnnnnnnnnnnnnnnnnnnnnnnnnnnnnnnnnnnnnnnnnnnnnnnnnnnnnnnnnnnnnnnnnnnnnnnnnnnnnnnnnnnnnnnnnnnnnnnnnnnnnnnnnnnnnnnnnnnnnnnnnnnnnnnnnnnnnnnnnnnnnnnnnnnnnnnnnnnnnnnnnnnnnnnnnnnnnnnnnnnnnnnnnnnnnnnnnnnnnnnnnnnnnnnnnnnnnnnnnnnnnnnnnnnnnnnnnnnnnnnnnnnnnnnnnnnnnnnnnnnnnnnnnnnnnnnnnnnnnnnnnnnnnnnnnnnnnnnnnnnnnnnnnnnnnnnnnnnnnnnnnnnnnnnnnnnnnnnnnnnnnnnnnnnnnnnnnnnnnnnnnnnnnnnnnnnnnnnnnnnnnnnnnnnnnnnnnnnnnnnnnnnnnnnnnnnnnnnnnnnnnnnnnnnnnnnnnnnnnnnnnnnnnnnnnnnnnnnnnnnnnnnnnnnnnnnnnnnnnnnnnnnnnnnnnnnnnnnnnnnnnnnnnnnnnnnnnnnnnnnnnnnnnnnnnnnnnnnnnnnnnnnnnnnnnnnnnnnnnnnnnnnnnnnnnnnnnnnnnnnnnnnnnnnnnnnnnnnnnnnnnnnnnnnnnnnnnnnnnnnnnnnnnnnnnnnnnnnnnnnnnnnnnnnnnnnnnnnnnnnnnnnnnnnnnnnnnnnnnnnnnnnnnnnnnnnnnnnnnnnnnnnnnnnnnnnnnnnnnnnnnnnnnnnnnnnnnnnnnnnnnnnnnnnnnnnnnnnnnnnnnnnnnnnnnnnnnnnnnnnnnnnnnnnnnnnnnnnnnnnnnnnnnnnnnnnnnnnnnnnnnnnnnnnnnnnnnnnnnnnnnnnnnnnnnnnnnnnnnnnnnnnnnnnnnnnnnnnnnnnnnnnnnnnnnnnnnnnnnnnnnnnnnnnnnnnnnnnnnnnnnnnnnnnnnnnnnnnnnnnnnnnnnnnnnnnnnnnnnnnnnnnnnnnnnnnnnnnnnnnnnnnnnnnnnnnnnnnnnnnnnnnnnnnnnnnnnnnnnnnnnnnnnnnnnnnnnnnnnnnnnnnnnnnnnnnnnnnnnnnnnnnnnnnnnnnnnnnnnnnnnnnnnnnnnnnnnnnnnnnnnnnnnnnnnnnnnnnnnnnnnnnnnnnnnnnnnnnnnnnnnnnnnnnnnnnnnnnnnnnnnnnnnnnnnnnnnnnnnnnnnnnnnnnnnnnnnnnnnnnnnnnnnnnnnnnnnnnnnnnnnnnnnnnnnnnnnnnnnnnnnnnnnnnnnnnnnnnnnnnnnnnnnnnnnnnnnnnnnnnnnnnnnnnnnnnnnnnnnnnnnnnnnnnnnnnnnnnnnnnnnnnnnnnnnnnnnnnnnnnnnnnnnnnnnnnnnnnnnnnnnnnnnnnnnnnnnnnnnnnnnnnnnnnnnnnnnnnnnnnnnnnnnnnnnnnnnnnnnnnnnnnnnnnnnnnnnnnnnnnnnnnnnnnnnnnnnnnnnnnnnnnnnnnnnnnnnnnnnnnnnnnnnnnnnnnnnnnnnnnnnnnnnnnnnnnnnnnnnnnnnnnnnnnnnnnnnnnnnnnnnnnnnnnnnnnnnnnnnnnnnnnnnnnnnnnnnnnnnnnnnnnnnnnnnnnnnnnnnnnnnnnnnnnnnnnnnnnnnnnnnnnnnnnnnnnnnnnnnnnnnnnnnnnnnnnnnnnnnnnnnnnnnnnnnnnnnnnnnnnnnnnnnnnnnnnnnnnnnnnnnnnnnnnnnnnnnnnnnnnnnnnnnnnnnnnnnnnnnnnnnnnnnnnnnnnnnnnnnnnnnnnnnnnnnnnnnnnnnnnnnnnnnnnnnnnnnnnnnnnnnnnnnnnnnnnnnnnnnnnnnnnnnnnnnnnnnnnnnnnnnnnnnnnnnnnnnnnnnnnnnnnnnnnnnnnnnnnnnnnnnnnnnnnnnnnnnnnnnnnnnnnnnnnnnnnnnnnnnnnnnnnnnnnnnnnnnnnnnnnnnnnnnnnnnnnnnnnnnnnnnnnnnnnnnnnnnnnnnnnnnnnnnnnnnnnnnnnnnnnnnnnnnnnnnnnnnnnnnnnnnnnnnnnnnnnnnnnnnnnnnnnnnnnnnnnnnnnnnnnnnnnnnnnnnnnnnnnnnnnnnnnnnnnnnnnnnnnnnnnnnnnnnnnnnnnnnnnnnnnnnnnnnnnnnnnnnnnnnnnnnnnnnnnnnnnnnnnnnnnnnnnnnnnnnnnnnnnnnnnnnnnnnnnnnnnnnnnnnnnnnnnnnnnnnnnnnnnnnnnnnnnnnnnnnnnnnnnnnnnnnnnnnnnnnnnnnnnnnnnnnnnnnnnnnnnnnnnnnnnnnnnnnnnnnnnnnnnnnnnnnnnnnnnnnnnnnnnnnnnnnnnnnnnnnnnnnnnnnnnnnnnnnnnnnnnnnnnnnnnnnnnnnnnnnnnnnnnnnnnnnnnnnnnnnnnnnnnnnnnnnnnnnnnnnnnnnnnnnnnnnnnnnnnnnnnnnnnnnnnnnnnnnnnnnnnnnnnnnnnnnnnnnnnnnnnnnnnnnnnnnnnnnnnnnnnnnnnnnnnnnnnnnnnnnnnnnnnnnnnnnnnnnnnnnnnnnnnnnnnnnnnnnnnnnnnnnnnnnnnnnnnnnnnnnnnnnnnnnnnnnnnnnnnnnnnnnnnnnnnnnnnnnnnnnnnnnnnnnnnnnnnnnnnnnnnnnnnnnnnnnnnnnnnnnnnnnnnnnnnnnnnnnnnnnnnnnnnnnnnnnnnnnnnnnnnnnnnnnnnnnnnnnnnnnnnnnnnnnnnnnnnnnnnnnnnnnnnnnnnnnnnnnnnnnnnnnnnnnnnnnnnnnnnnnnnnnnnnnnnnnnnnnnnnnnnnnnnnnnnnnnnnnnnnnnnnnnnnnnnnnnnnnnnnnnnnnnnnnnnnnnnnnnnnnnnnnnnnnnnnnnnnnnnnnnnnnnnnnnnnnnnnnnnnnnnnnnnnnnnnnnnnnnnnnnnnnnnnnnnnnnnnnnnnnnnnnnnnnnnnnnnnnnnnnnnnnnnnnnnnnnnnnnnnnnnnnnnnnnnnnnnnnnnnnnnnnnnnnnnnnnnnnnnnnnnnnnnnnnnnnnnnnnnnnnnnnnnnnnnnnnnnnnnnnnnnnnnnnnnnnnnnnnnnnnnnnnnnnnnnnnnnnnnnnnnnnnnnnnnnnnnnnnnnnnnnnnnnnnnnnnnnnnnnnnnnnnnnnnnnnnnnnnnnnnnnnnnnnnnnnnnnnnnnnnnnnnnnnnnnnnnnnnnnnnnnnnnnnnnnnnnnnnnnnnnnnnnnnnnnnnnnnnnnnnnnnnnnnnnnnnnnnnnnnnnnnnnnnnnnnnnnnnnnnnnnnnnnnnnnnnnnnnnnnnnnnnnnnnnnnnnnnnnnnnnnnnnnnnnnnnnnnnnnnnnnnnnnnnnnnnnnnnnnnnnnnnnnnnnnnnnnnnnnnnnnnnnnnnnnnnnnnnnnnnnnnnnnnnnnnnnnnnnnnnnnnnnnnnnnnnnnnnnnnnnnnnnnnnnnnnnnnnnnnnnnnnnnnnnnnnnnnnnnnnnnnnnnnnnnnnnnnnnnnnnnnnnnnnnnnnnnnnnnnnnnnnnnnnnnnnnnnnnnnnnnnnnnnnnnnnnnnnnnnnnnnnnnnnnnnnnnnnnnnnnnnnnnnnnnnnnnnnnnnnnnnnnnnnnnnnnnnnnnnnnnnnnnnnnnnnnnnnnnnnnnnnnnnnnnnnnnnnnnnnnnnnnnnnnnnnnnnnnnnnnnnnnnnnnnnnnnnnnnnnnnnnnnnnnnnnnnnnnnnnnnnnnnnnnnnnnnnnnnnnnnnnnnnnnnnnnnnnnnnnnnnnnnnnnnnnnnnnnnnnnnnnnnnnnnnnnnnnnnnnnnnnnnnnnnnnnnnnnnnnnnnnnnnnnnnnnnnnnnnnnnnnnnnnnnnnnnnnnnnnnnnnnnnnnnnnnnnnnnnnnnnnnnnnnnnnnnnnnnnnnnnnnnnnnnnnnnnnnnnnnnnnnnnnnnnnnnnnnnnnnnnnnnnnnnnnnnnnnnnnnnnnnnnnnnnnnnnnnnnnnnnnnnnnnnnnnnnnnnnnnnnnnnnnnnnnnnnnnnnnnnnnnnnnnnnnnnnnnnnnnnnnnnnnnnnnnnnnnnnnnnnnnnnnnnnnnnnnnnnnnnnnnnnnnnnnnnnnnnnnnnnnnnnnnnnnnnnnnnnnnnnnnnnnnnnnnnnnnnnnnnnnnnnnnnnnnnnnnnnnnnnnnnnnnnnnnnnnnnnnnnnnnnnnnnnnnnnnnnnnnnnnnnnnnnnnnnnnnnnnnnnnnnnnnnnnnnnnnnnnnnnnnnnnnnnnnnnnnnnnnnnnnnnnnnnnnnnnnnnnnnnnnnnnnnnnnnnnnnnnnnnnnnnnnnnnnnnnnnnnnnnnnnnnnnnnnnnnnnnnnnnnnnnnnnnnnnnnnnnnnnnnnnnnnnnnnnnnnnnnnnnnnnnnnnnnnnnnnnnnnnnnnnnnnnnnnnnnnnnnnnnnnnnnnnnnnnnnnnnnnnnnnnnnnnnnnnnnnnnnnnnnnnnnnnnnnnnnnnnnnnnnnnnnnnnnnnnnnnnnnnnnnnnnnnnnnnnnnnnnnnnnnnnnnnnnnnnnnnnnnnnnnnnnnnnnnnnnnnnnnnnnnnnnnnnnnnnnnnnnnnnnnnnnnnnnnnnnnnnnnnnnnnnnnnnnnnnnnnnnnnnnnnnnnnnnnnnnnnnnnnnnnnnnnnnnnnnnnnnnnnnnnnnnnnnnnnnnnnnnnnnnnnnnnnnnnnnnnnnnnnnnnnnnnnnnnnnnnnnnnnnnnnnnnnnnnnnnnnnnnnnnnnnnnnnnnnnnnnnnnnnnnnnnnnnnnnnnnnnnnnnnnnnnnnnnnnnnnnnnnnnnnnnnnnnnnnnnnnnnnnnnnnnnnnnnnnnnnnnnnnnnnnnnnnnnnnnnnnnnnnnnnnnnnnnnnnnnnnnnnnnnnnnnnnnnnnnnnnnnnnnnnnnnnnnnnnnnnnnnnnnnnnnnnnnnnnnnnnnnnnnnnnnnnnnnnnnnnnnnnnnnnnnnnnnnnnnnnnnnnnnnnnnnnnnnnnnnnnnnnnnnnnnnnnnnnnnnnnnnnnnnnnnnnnnnnnnnnnnnnnnnnnnnnnnnnnnnnnnnnnnnnnnnnnnnnnnnnnnnnnnnnnnnnnnnnnnnnnnnnnnnnnnnnnnnnnnnnnnnnnnnnnnnnnnnnnnnnnnnnnnnnnnnnnnnnnnnnnnnnnnnnnnnnnnnnnnnnnnnnnnnnnnnnnnnnnnnnnnnnnnnnnnnnnnnnnnnnnnnnnnnnnnnnnnnnnnnnnnnnnnnnnnnnnnnnnnnnnnnnnnnnnnnnnnnnnnnnnnnnnnnnnnnnnnnnnnnnnnnnnnnnnnnnnnnnnnnnnnnnnnnnnnnnnnnnnnnnnnnnnnnnnnnnnnnnnnnnnnnnnnnnnnnnnnnnnnnnnnnnnnnnnnnnnnnnnnnnnnnnnnnnnnnnnnnnnnnnnnnnnnnnnnnnnnnnnnnnnnnnnnnnnnnnnnnnnnnnnnnnnnnnnnnnnnnnnnnnnnnnnnnnnnnnnnnnnnnnnnnnnnnnnnnnnnnnnnnnnnnnnnnnnnnnnnnnnnnnnnnnnnnnnnnnnnnnnnnnnnnnnnnnnnnnnnnnnnnnnnnnnnnnnnnnnnnnnnnnnnnnnnnnnnnnnnnnnnnnnnnnnnnnnnnnnnnnnnnnnnnnnnnnnnnnnnnnnnnnnnnnnnnnnnnnnnnnnnnnnnnnnnnnnnnnnnnnnnnnnnnnnnnnnnnnnnnnnnnnnnnnnnnnnnnnnnnnnnnnnnnnnnnnnnnnnnnnnnnnnnnnnnnnnnnnnnnnnnnnnnnnnnnnnnnnnnnnnnnnnnnnnnnnnnnnnnnnnnnnnnnnnnnnnnnnnnnnnnnnnnnnnnnnnnnnnnnnnnnnnnnnnnnnnnnnnnnnnnnnnnnnnnnnnnnnnnnnnnnnnnnnnnnnnnnnnnnnnnnnnnnnnnnnnnnnnnnnnnnnnnnnnnnnnnnnnnnnnnnnnnnnnnnnnnnnnnnnnnnnnnnnnnnnnnnnnnnnnnnnnnnnnnnnnnnnnnnnnnnnnnnnnnnnnnnnnnnnnnnnnnnnnnnnnnnnnnnnnnnnnnnnnnnnnnnnnnnnnnnnnnnnnnnnnnnnnnnnnnnnnnnnnnnnnnnnnnnnnnnnnnnnnnnnnnnnnnnnnnnnnnnnnnnnnnnnnnnnnnnnnnnnnnnnnnnnnnnnnnnnnnnnnnnnnnnnnnnnnnnnnnnnnnnnnnnnnnnnnnnnnnnnnnnnnnnnnnnnnnnnnnnnnnnnnnnnnnnnnnnnnnnnnnnnnnnnnnnnnnnnnnnnnnnnnnnnnnnnnnnnnnnnnnnnnnnnnnnnnnnnnnnnnnnnnnnnnnnnnnnnnnnnnnnnnnnnnnnnnnnnnnnnnnnnnnnnnnnnnnnnnnnnnnnnnnnnnnnnnnnnnnnnnnnnnnnnnnnnnnnnnnnnnnnnnnnnnnnnnnnnnnnnnnnnnnnnnnnnnnnnnnnnnnnnnnnnnnnnnnnnnnnnnnnnnnnnnnnnnnnnnnnnnnnnnnnnnnnnnnnnnnnnnnnnnnnnnnnnnnnnnnnnnnnnnnnnnnnnnnnnnnnnnnnnnnnnnnnnnnnnnnnnnnnnnnnnnnnnnnnnnnnnnnnnnnnnnnnnnnnnnnnnnnnnnnnnnnnnnnnnnnnnnnnnnnnnnnnnnnnnnnnnnnnnnnnnnnnnnnnnnnnnnnnnnnnnnnnnnnnnnnnnnnnnnnnnnnnnnnnnnnnnnnnnnnnnnnnnnnnnnnnnnnnnnnnnnnnnnnnnnnnnnnnnnnnnnnnnnnnnnnnnnnnnnnnnnnnnnnnnnnnnnnnnnnnnnnnnnnnnnnnnnnnnnnnnnnnnnnnnnnnnnnnnnnnnnnnnnnnnnnnnnnnnnnnnnnnnnnnnnnnnnnnnnnnnnnnnnnnnnnnnnnnnnnnnnnnnnnnnnnnnnnnnnnnnnnnnnnnnnnnnnnnnnnnnnnnnnnnnnnnnnnnnnnnnnnnnnnnnnnnnnnnnnnnnnnnnnnnnnnnnnnnnnnnnnnnnnnnnnnnnnnnnnnnnnnnnnnnnnnnnnnnnnnnnnnnnnnnnnnnnnnnnnnnnnnnnnnnnnnnnnnnnnnnnnnnnnnnnnnnnnnnnnnnnnnnnnnnnnnnnnnnnnnnnnnnnnnnnnnnnnnnnnnnnnnnnnnnnnnnnnnnnnnnnnnnnnnnnnnnnnnnnnnnnnnnnnnnnnnnnnnnnnnnnnnnnnnnnnnnnnnnnnnnnnnnnnnnnnnnnnnnnnnnnnnnnnnnnnnnnnnnnnnnnnnnnnnnnnnnnnnnnnnnnnnnnnnnnnnnnnnnnnnnnnnnnnnnnnnnnnnnnnnnnnnnnnnnnnnnnnnnnnnnnnnnnnnnnnnnnnnnnnnnnnnnnnnnnnnnnnnnnnnnnnnnnnnnnnnnnnnnnnnnnnnnnnnnnnnnnnnnnnnnnnnnnnnnnnnnnnnnnnnnnnnnnnnnnnnnnnnnnnnnnnnnnnnnnnnnnnnnnnnnnnnnnnnnnnnnnnnnnnnnnnnnnnnnnnnnnnnnnnnnnnnnnnnnnnnnnnnnnnnnnnnnnnnnnnnnnnnnnnnnnnnnnnnnnnnnnnnnnnnnnnnnnnnnnnnnnnnnnnnnnnnnnnnnnnnnnnnnnnnnnnnnnnnnnnnnnnnnnnnnnnnnnnnnnnnnnnnnnnnnnnnnnnnnnnnnnnnnnnnnnnnnnnnnnnnnnnnnnnnnnnnnnnnnnnnnnnnnnnnnnnnnnnnnnnnnnnnnnnnnnnnnnnnnnnnnnnnnnnnnnnnnnnnnnnnnnnnnnnnnnnnnnnnnnnnnnnnnnnnnnnnnnnnnnnnnnnnnnnnnnnnnnnnnnnnnnnnnnnnnnnnnnnnnnnnnnnnnnnnnnnnnnnnnnnnnnnnnnnnnnnnnnnnnnnnnnnnnnnnnnnnnnnnnnnnnnnnnnnnnnnnnnnnnnnnnnnnnnnnnnnnnnnnnnnnnnnnnnnnnnnnnnnnnnnnnnnnnnnnnnnnnnnnnnnnnnnnnnnnnnnnnnnnnnnnnnnnnnnnnnnnnnnnnnnnnnnnnnnnnnnnnnnnnnnnnnnnnnnnnnnnnnnnnnnnnnnnnnnnnnnnnnnnnnnnnnnnnnnnnnnnnnnnnnnnnnnnnnnnnnnnnnnnnnnnnnnnnnnnnnnnnnnnnnnnnnnnnnnnnnnnnnnnnnnnnnnnnnnnnnnnnnnnnnnnnnnnnnnnnnnnnnnnnnnnnnnnnnnnnnnnnnnnnnnnnnnnnnnnnnnnnnnnnnnnnnnnnnnnnnnnnnnnnnnnnnnnnnnnnnnnnnnnnnnnnnnnnnnnnnnnnnnnnnnnnnnnnnnnnnnnnnnnnnnnnnnnnnnnnnnnnnnnnnnnnnnnnnnnnnnnnnnnnnnnnnnnnnnnnnnnnnnnnnnnnnnnnnnnnnnnnnnnnnnnnnnnnnnnnnnnnnnnnnnnnnnnnnnnnnnnnnnnnnnnnnnnnnnnnnnnnnnnnnnnnnnnnnnnnnnnnnnnnnnnnnnnnnnnnnnnnnnnnnnnnnnnnnnnnnnnnnnnnnnnnnnnnnnnnnnnnnnnnnnnnnnnnnnnnnnnnnnnnnnnnnnnnnnnnnnnnnnnnnnnnnnnnnnnnnnnnnnnnnnnnnnnnnnnnnnnnnnnnnnnnnnnnnnnnnnnnnnnnnnnnnnnnnnnnnnnnnnnnnnnnnnnnnnnnnnnnnnnnnnnnnnnnnnnnnnnnnnnnnnnnnnnnnnnnnnnnnnnnnnnnnnnnnnnnnnnnnnnnnnnnnnnnnnnnnnnnnnnnnnnnnnnnnnnnnnnnnnnnnnnnnnnnnnnnnnnnnnnnnnnnnnnnnnnnnnnnnnnnnnnnnnnnnnnnnnnnnnnnnnnnnnnnnnnnnnnnnnnnnnnnnnnnnnnnnnnnnnnnnnnnnnnnnnnnnnnnnnnnnnnnnnnnnnnnnnnnnnnnnnnnnnnnnnnnnnnnnnnnnnnnnnnnnnnnnnnnnnnnnnnnnnnnnnnnnnnnnnnnnnnnnnnnnnnnnnnnnnnnnnnnnnnnnnnnnnnnnnnnnnnnnnnnnnnnnnnnnnnnnnnnnnnnnnnnnnnnnnnnnnnnnnnnnnnnnnnnnnnnnnnnnnnnnnnnnnnnnnnnnnnnnnnnnnnnnnnnnnnnnnnnnnnnnnnnnnnnnnnnnnnnnnnnnnnnnnnnnnnnnnnnnnnnnnnnnnnnnnnnnnnnnnnnnnnnnnnnnnnnnnnnnnnnnnnnnnnnnnnnnnnnnnnnnnnnnnnnnnnnnnnnnnnnnnnnnnnnnnnnnnnnnnnnnnnnnnnnnnnnnnnnnnnnnnnnnnnnnnnnnnnnnnnnnnnnnnnnnnnnnnnnnnnnnnnnnnnnnnnnnnnnnnnnnnnnnnnnnnnnnnnnnnnnnnnnnnnnnnnnnnnnnnnnnnnnnnnnnnnnnnnnnnnnnnnnnnnnnnnnnnnnnnnnnnnnnnnnnnnnnnnnnnnnnnnnnnnnnnnnnnnnnnnnnnnnnnnnnnnnnnnnnnnnnnnnnnnnnnnnnnnnnnnnnnnnnnnnnnnnnnnnnnnnnnnnnnnnnnnnnnnnnnnnnnnnnnnnnnnnnnnnnnnnnnnnnnnnnnnnnnnnnnnnnnnnnnnnnnnnnnnnnnnnnnnnnnnnnnnnnnnnnnnnnnnnnnnnnnnnnnnnnnnnnnnnnnnnnnnnnnnnnnnnnnnnnnnnnnnnnnnnnnnnnnnnnnnnnnnnnnnnnnnnnnnnnnnnnnnnnnnnnnnnnnnnnnnnnnnnnnnnnnnnnnnnnnnnnnnnnnnnnnnnnnnnnnnnnnnnnnnnnnnnnnnnnnnnnnnnnnnnnnnnnnnnnnnnnnnnnnnnnnnnnnnnnnnnnnnnnnnnnnnnnnnnnnnnnnnnnnnnnnnnnnnnnnnnnnnnnnnnnnnnnnnnnnnnnnnnnnnnnnnnnnnnnnnnnnnnnnnnnnnnnnnnnnnnnnnnnnnnnnnnnnnnnnnnnnnnnnnnnnnnnnnnnnnnnnnnnnnnnnnnnnnnnnnnnnnnnnnnnnnnnnnnnnnnnnnnnnnnnnnnnnnnnnnnnnnnnnnnnnnnnnnnnnnnnnnnnnnnnnnnnnnnnnnnnnnnnnnnnnnnnnnnnnnnnnnnnnnnnnnnnnnnnnnnnnnnnnnnnnnnnnnnnnnnnnnnnnnnnnnnnnnnnnnnnnnnnnnnnnnnnnnnnnnnnnnnnnnnnnnnnnnnnnnnnnnnnnnnnnnnnnnnnnnnnnnnnnnnnnnnnnnnnnnnnnnnnnnnnnnnnnnnnnnnnnnnnnnnnnnnnnnnnnnnnnnnnnnnnnnnnnnnnnnnnnnnnnnnnnnnnnnnnnnnnnnnnnnnnnnnnnnnnnnnnnnnnnnnnnnnnnnnnnnnnnnnnnnnnnnnnnnnnnnnnnnnnnnnnnnnnnnnnnnnnnnnnnnnnnnnnnnnnnnnnnnnnnnnnnnnnnnnnnnnnnnnnnnnnnnnnnnnnnnnnnnnnnnnnnnnnnnnnnnnnnnnnnnnnnnnnnnnnnnnnnnnnnnnnnnnnnnnnnnnnnnnnnnnnnnnnnnnnnnnnnnnnnnnnnnnnnnnnnnnnnnnnnnnnnnnnnnnnnnnnnnnnnnnnnnnnnnnnnnnnnnnnnnnnnnnnnnnnnnnnnnnnnnnnnnnnnnnnnnnnnnnnnnnnnnnnnnnnnnnnnnnnnnnnnnnnnnnnnnnnnnnnnnnnnnnnnnnnnnnnnnnnnnnnnnnnnnnnnnnnnnnnnnnnnnnnnnnnnnnnnnnnnnnnnnnnnnnnnnnnnnnnnnnnnnnnnnnnnnnnnnnnnnnnnnnnnnnnnnnnnnnnnnnnnnnnnnnnnnnnnnnnnnnnnnnnnnnnnnnnnnnnnnnnnnnnnnnnnnnnnnnnnnnnnnnnnnnnnnnnnnnnnnnnnnnnnnnnnnnnnnnnnnnnnnnnnnnnnnnnnnnnnnnnnnnnnnnnnnnnnnnnnnnnnnnnnnnnnnnnnnnnnnnnnnnnnnnnnnnnnnnnnnnnnnnnnnnnnnnnnnnnnnnnnnnnnnnnnnnnnnnnnnnnnnnnnnnnnnnnnnnnnnnnnnnnnnnnnnnnnnnnnnnnnnnnnnnnnnnnnnnnnnnnnnnnnnnnnnnnnnnnnnnnnnnnnnnnnnnnnnnnnnnnnnnnnnnnnnnnnnnnnnnnnnnnnnnnnnnnnnnnnnnnnnnnnnnnnnnnnnnnnnnnnnnnnnnnnnnnnnnnnnnnnnnnnnnnnnnnnnnnnnnnnnnnnnnnnnnnnnnnnnnnnnnnnnnnnnnnnnnnnnnnnnnnnnnnnnnnnnnnnnnnnnnnnnnnnnnnnnnnnnnnnnnnnnnnnnnnnnnnnnnnnnnnnnnnnnnnnnnnnnnnnnnnnnnnnnnnnnnnnnnnnnnnnnnnnnnnnnnnnnnnnnnnnnnnnnnnnnnnnnnnnnnnnnnnnnnnnnnnnnnnnnnnnnnnnnnnnnnnnnnnnnnnnnnnnnnnnnnnnnnnnnnnnnnnnnnnnnnnnnnnnnnnnnnnnnnnnnnnnnnnnnnnnnnnnnnnnnnnnnnnnnnnnnnnnnnnnnnnnnnnnnnnnnnnnnnnnnnnnnnnnnnnnnnnnnnnnnnnnnnnnnnnnnnnnnnnnnnnnnnnnnnnnnnnnnnnnnnnnnnnnnnnnnnnnnnnnnnnnnnnnnnnnnnnnnnnnnnnnnnnnnnnnnnnnnnnnnnnnnnnnnnnnnnnnnnnnnnnnnnnnnnnnnnnnnnnnnnnnnnnnnnnnnnnnnnnnnnnnnnnnnnnnnnnnnnnnnnnnnnnnnnnnnnnnnnnnnnnnnnnnnnnnnnnnnnnnnnnnnnnnnnnnnnnnnnnnnnnnnnnnnnnnnnnnnnnnnnnnnnnnnnnnnnnnnnnnnnnnnnnnnnnnnnnnnnnnnnnnnnnnnnnnnnnnnnnnnnnnnnnnnnnnnnnnnnnnnnnnnnnnnnnnnnnnnnnnnnnnnnnnnnnnnnnnnnnnnnnnnnnnnnnnnnnnnnnnnnnnnnnnnnnnnnnnnnnnnnnnnnnnnnnnnnnnnnnnnnnnnnnnnnnnnnnnnnnnnnnnnnnnnnnnnnnnnnnnnnnnnnnnnnnnnnnnnnnnnnnnnnnnnnnnnnnnnnnnnnnnnnnnnnnnnnnnnnnnnnnnnnnnnnnnnnnnnnnnnnnnnnnnnnnnnnnnnnnnnnnnnnnnnnnnnnnnnnnnnnnnnnnnnnnnnnnnnnnnnnnnnnnnnnnnnnnnnnnnnnnnnnnnnnnnnnnnnnnnnnnnnnnnnnnnnnnnnnnnnnnnnnnnnnnnnnnnnnnnnnnnnnnnnnnnnnnnnnnnnnnnnnnnnnnnnnnnnnnnnnnnnnnnnnnnnnnnnnnnnnnnnnnnnnnnnnnnnnnnnnnnnnnnnnnnnnnnnnnnnnnnnnnnnnnnnnnnnnnnnnnnnnnnnnnnnnnnnnnnnnnnnnnnnnnnnnnnnnnnnnnnnnnnnnnnnnnnnnnnnnnnnnnnnnnnnnnnnnnnnnnnnnnnnnnnnnnnnnnnnnnnnnnnnnnnnnnnnnnnnnnnnnnnnnnnnnnnnnnnnnnnnnnnnnnnnnnnnnnnnnnnnnnnnnnnnnnnnnnnnnnnnnnnnnnnnnnnnnnnnnnnnnnnnnnnnnnnnnnnnnnnnnnnnnnnnnnnnnnnnnnnnnnnnnnnnnnnnnnnnnnnnnnnnnnnnnnnnnnnnnnnnnnnnnnnnnnnnnnnnnnnnnnnnnnnnnnnnnnnnnnnnnnnnnnnnnnnnnnnnnnnnnnnnnnnnnnnnnnnnnnnnnnnnnnnnnnnnnnnnnnnnnnnnnnnnnnnnnnnnnnnnnnnnnnnnnnnnnnnnnnnnnnnnnnnnnnnnnnnnnnnnnnnnnnnnnnnnnnnnnnnnnnnnnnnnnnnnnnnnnnnnnnnnnnnnnnnnnnnnnnnnnnnnnnnnnnnnnnnnnnnnnnnnnnnnnnnnnnnnnnnnnnnnnnnnnnnnnnnnnnnnnnnnnnnnnnnnnnnnnnnnnnnnnnnnnnnnnnnnnnnnnnnnnnnnnnnnnnnnnnnnnnnnnnnnnnnnnnnnnnnnnnnnnnnnnnnnnnnnnnnnnnnnnnnnnnnnnnnnnnnnnnnnnnnnnnnnnnnnnnnnnnnnnnnnnnnnnnnnnnnnnnnnnnnnnnnnnnnnnnnnnnnnnnnnnnnnnnnnnnnnnnnnnnnnnnnnnnnnnnnnnnnnnnnnnnnnnnnnnnnnnnnnnnnnnnnnnnnnnnnnnnnnnnnnnnnnnnnnnnnnnnnnnnnnnnnnnnnnnnnnnnnnnnnnnnnnnnnnnnnnnnnnnnnnnnnnnnnnnnnnnnnnnnnnnnnnnnnnnnnnnnnnnnnnnnnnnnnnnnnnnnnnnnnnnnnnnnnnnnnnnnnnnnnnnnnnnnnnnnnnnnnnnnnnnnnnnnnnnnnnnnnnnnnnnnnnnnnnnnnnnnnnnnnnnnnnnnnnnnnnnnnnnnnnnnnnnnnnnnnnnnnnnnnnnnnnnnnnnnnnnnnnnnnnnnnnnnnnnnnnnnnnnnnnnnnnnnnnnnnnnnnnnnnnnnnnnnnnnnnnnnnnnnnnnnnnnnnnnnnnnnnnnnnnnnnnnnnnnnnnnnnnnnnnnnnnnnnnnnnnnnnnnnnnnnnnnnnnnnnnnnnnnnnnnnnnnnnnnnnnnnnnnnnnnnnnnnnnnnnnnnnnnnnnnnnnnnnnnnnnnnnnnnnnnnnnnnnnnnnnnnnnnnnnnnnnnnnnnnnnnnnnnnnnnnnnnnnnnnnnnnnnnnnnnnnnnnnnnnnnnnnnnnnnnnnnnnnnnnnnnnnnnnnnnnnnnnnnnnnnnnnnnnnnnnnnnnnnnnnnnnnnnnnnnnnnnnnnnnnnnnnnnnnnnnnnnnnnnnnnnnnnnnnnnnnnnnnnnnnnnnnnnnnnnnnnnnnnnnnnnnnnnnnnnnnnnnnnnnnnnnnnnnnnnnnnnnnnnnnnnnnnnnnnnnnnnnnnnnnnnnnnnnnnnnnnnnnnnnnnnnnnnnnnnnnnnnnnnnnnnnnnnnnnnnnnnnnnnnnnnnnnnnnnnnnnnnnnnnnnnnnnnnnnnnnnnnnnnnnnnnnnnnnnnnnnnnnnnnnnnnnnnnnnnnnnnnnnnnnnnnnnnnnnnnnnnnnnnnnnnnnnnnnnnnnnnnnnnnnnnnnnnnnnnnnnnnnnnnnnnnnnnnnnnnnnnnnnnnnnnnnnnnnnnnnnnnnnnnnnnnnnnnnnnnnnnnnnnnnnnnnnnnnnnnnnnnnnnnnnnnnnnnnnnnnnnnnnnnnnnnnnnnnnnnnnnnnnnnnnnnnnnnnnnnnnnnnnnnnnnnnnnnnnnnnnnnnnnnnnnnnnnnnnnnnnnnnnnnnnnnnnnnnnnnnnnnnnnnnnnnnnnnnnnnnnnnnnnnnnnnnnnnnnnnnnnnnnnnnnnnnnnnnnnnnnnnnnnnnnnnnnnnnnnnnnnnnnnnnnnnnnnnnnnnnnnnnnnnnnnnnnnnnnnnnnnnnnnnnnnnnnnnnnnnnnnnnnnnnnnnnnnnnnnnnnnnnnnnnnnnnnnnnnnnnnnnnnnnnnnnnnnnnnnnnnnnnnnnnnnnnnnnnnnnnnnnnnnnnnnnnnnnnnnnnnnnnnnnnnnnnnnnnnnnnnnnnnnnnnnnnnnnnnnnnnnnnnnnnnnnnnnnnnnnnnnnnnnnnnnnnnnnnnnnnnnnnnnnnnnnnnnnnnnnnnnnnnnnnnnnnnnnnnnnnnnnnnnnnnnnnnnnnnnnnnnnnnnnnnnnnnnnnnnnnnnnnnnnnnnnnnnnnnnnnnnnnnnnnnnnnnnnnnnnnnnnnnnnnnnnnnnnnnnnnnnnnnnnnnnnnnnnnnnnnnnnnnnnnnnnnnnnnnnnnnnnnnnnnnnnnnnnnnnnnnnnnnnnnnnnnnnnnnnnnnnnnnnnnnnnnnnnnnnnnnnnnnnnnnnnnnnnnnnnnnnnnnnnnnnnnnnnnnnnnnnnnnnnnnnnnnnnnnnnnnnnnnnnnnnnnnnnnnnnnnnnnnnnnnnnnnnnnnnnnnnnnnnnnnnnnnnnnnnnnnnnnnnnnnnnnnnnnnnnnnnnnnnnnnnnnnnnnnnnnnnnnnnnnnnnnnnnnnnnnnnnnnnnnnnnnnnnnnnnnnnnnnnnnnnnnnnnnnnnnnnnnnnnnnnnnnnnnnnnnnnnnnnnnnnnnnnnnnnnnnnnnnnnnnnnnnnnnnnnnnnnnnnnnnnnnnnnnnnnnnnnnnnnnnnnnnnnnnnnnnnnnnnnnnnnnnnnnnnnnnnnnnnnnnnnnnnnnnnnnnnnnnnnnnnnnnnnnnnnnnnnnnnnnnnnnnnnnnnnnnnnnnnnnnnnnnnnnnnnnnnnnnnnnnnnnnnnnnnnnnnnnnnnnnnnnnnnnnnnnnnnnnnnnnnnnnnnnnnnnnnnnnnnnnnnnnnnnnnnnnnnnnnnnnnnnnnnnnnnnnnnnnnnnnnnnnnnnnnnnnnnnnnnnnnnnnnnnnnnnnnnnnnnnnnnnnnnnnnnnnnnnnnnnnnnnnnnnnnnnnnnnnnnnnnnnnnnnnnnnnnnnnnnnnnnnnnnnnnnnnnnnnnnnnnnnnnnnnnnnnnnnnnnnnnnnnnnnnnnnnnnnnnnnnnnnnnnnnnnnnnnnnnnnnnnnnnnnnnnnnnnnnnnnnnnnnnnnnnnnnnnnnnnnnnnnnnnnnnnnnnnnnnnnnnnnnnnnnnnnnnnnnnnnnnnnnnnnnnnnnnnnnnnnnnnnnnnnnnnnnnnnnnnnnnnnnnnnnnnnnnnnnnnnnnnnnnnnnnnnnnnnnnnnnnnnnnnnnnnnnnnnnnnnnnnnnnnnnnnnnnnnnnnnnnnnnnnnnnnnnnnnnnnnnnnnnnnnnnnnnnnnnnnnnnnnnnnnnnnnnnnnnnnnnnnnnnnnnnnnnnnnnnnnnnnnnnnnnnnnnnnnnnnnnnnnnnnnnnnnnnnnnnnnnnnnnnnnnnnnnnnnnnnnnnnnnnnnnnnnnnnnnnnnnnnnnnnnnnnnnnnnnnnnnnnnnnnnnnnnnnnnnnnnnnnnnnnnnnnnnnnnnnnnnnnnnnnnnnnnnnnnnnnnnnnnnnnnnnnnnnnnnnnnnnnnnnnnnnnnnnnnnnnnnnnnnnnnnnnnnnnnnnnnnnnnnnnnnnnnnnnnnnnnnnnnnnnnnnnnnnnnnnnnnnnnnnnnnnnnnnnnnnnnnnnnnnnnnnnnnnnnnnnnnnnnnnnnnnnnnnnnnnnnnnnnnnnnnnnnnnnnnnnnnnnnnnnnnnnnnnnnnnnnnnnnnnnnnnnnnnnnnnnnnnnnnnnnnnnnnnnnnnnnnnnnnnnnnnnnnnnnnnnnnnnnnnnnnnnnnnnnnnnnnnnnnnnnnnnnnnnnnnnnnnnnnnnnnnnnnnnnnnnnnnnnnnnnnnnnnnnnnnnnnnnnnnnnnnnnnnnnnnnnnnnnnnnnnnnnnnnnnnnnnnnnnnnnnnnnnnnnnnnnnnnnnnnnnnnnnnnnnnnnnnnnnnnnnnnnnnnnnnnnnnnnnnnnnnnnnnnnnnnnnnnnnnnnnnnnnnnnnnnnnnnnnnnnnnnnnnnnnnnnnnnnnnnnnnnnnnnnnnnnnnnnnnnnnnnnnnnnnnnnnnnnnnnnnnnnnnnnnnnnnnnnnnnnnnnnnnnnnnnnnnnnnnnnnnnnnnnnnnnnnnnnnnnnnnnnnnnnnnnnnnnnnnnnnnnnnnnnnnnnnnnnnnnnnnnnnnnnnnnnnnnnnnnnnnnnnnnnnnnnnnnnnnnnnnnnnnnnnnnnnnnnnnnnnnnnnnnnnnnnnnnnnnnnnnnnnnnnnnnnnnnnnnnnnnnnnnnnnnnnnnnnnnnnnnnnnnnnnnnnnnnnnnnnnnnnnnnnnnnnnnnnnnnnnnnnnnnnnnnnnnnnnnnnnnnnnnnnnnnnnnnnnnnnnnnnnnnnnnnnnnnnnnnnnnnnnnnnnnnnnnnnnnnnnnnnnnnnnnnnnnnnnnnnnnnnnnnnnnnnnnnnnnnnnnnnnnnnnnnnnnnnnnnnnnnnnnnnnnnnnnnnnnnnnnnnnnnnnnnnnnnnnnnnnnnnnnnnnnnnnnnnnnnnnnnnnnnnnnnnnnnnnnnnnnnnnnnnnnnnnnnnnnnnnnnnnnnnnnnnnnnnnnnnnnnnnnnnnnnnnnnnnnnnnnnnnnnnnnnnnnnnnnnnnnnnnnnnnnnnnnnnnnnnnnnnnnnnnnnnnnnnnnnnnnnnnnnnnnnnnnnnnnnnnnnnnnnnnnnnnnnnnnnnnnnnnnnnnnnnnnnnnnnnnnnnnnnnnnnnnnnnnnnnnnnnnnnnnnnnnnnnnnnnnnnnnnnnnnnnnnnnnnnnnnnnnnnnnnnnnnnnnnnnnnnnnnnnnnnnnnnnnnnnnnnnnnnnnnnnnnnnnnnnnnnnnnnnnnnnnnnnnnnnnnnnnnnnnnnnnnnnnnnnnnnnnnnnnnnnnnnnnnnnnnnnnnnnnnnnnnnnnnnnnnnnnnnnnnnnnnnnnnnnnnnnnnnnnnnnnnnnnnnnnnnnnnnnnnnnnnnnnnnnnnnnnnnnnnnnnnnnnnnnnnnnnnnnnnnnnnnnnnnnnnnnnnnnnnnnnnnnnnnnnnnnnnnnnnnnnnnnnnnnnnnnnnnnnnnnnnnnnnnnnnnnnnnnnnnnnnnnnnnnnnnnnnnnnnnnnnnnnnnnnnnnnnnnnnnnnnnnnnnnnnnnnnnnnnnnnnnnnnnnnnnnnnnnnnnnnnnnnnnnnnnnnnnnnnnnnnnnnnnnnnnnnnnnnnnnnnnnnnnnnnnnnnnnnnnnnnnnnnnnnnnnnnnnnnnnnnnnnnnnnnnnnnnnnnnnnnnnnnnnnnnnnnnnnnnnnnnnnnnnnnnnnnnnnnnnnnnnnnnnnnnnnnnnnnnnnnnnnnnnnnnnnnnnnnnnnnnnnnnnnnnnnnnnnnnnnnnnnnnnnnnnnnnnnnnnnnnnnnnnnnnnnnnnnnnnnnnnnnnnnnnnnnnnnnnnnnnnnnnnnnnnnnnnnnnnnnnnnnnnnnnnnnnnnnnnnnnnnnnnnnnnnnnnnnnnnnnnnnnnnnnnnnnnnnnnnnnnnnnnnnnnnnnnnnnnnnnnnnnnnnnnnnnnnnnnnnnnnnnnnnnnnnnnnnnnnnnnnnnnnnnnnnnnnnnnnnnnnnnnnnnnnnnnnnnnnnnnnnnnnnnnnnnnnnnnnnnnnnnnnnnnnnnnnnnnnnnnnnnnnnnnnnnnnnnnnnnnnnnnnnnnnnnnnnnnnnnnnnnnnnnnnnnnnnnnnnnnnnnnnnnnnnnnnnnnnnnnnnnnnnnnnnnnnnnnnnnnnnnnnnnnnnnnnnnnnnnnnnnnnnnnnnnnnnnnnnnnnnnnnnnnnnnnnnnnnnnnnnnnnnnnnnnnnnnnnnnnnnnnnnnnnnnnnnnnnnnnnnnnnnnnnnnnnnnnnnnnnnnnnnnnnnnnnnnnnnnnnnnnnnnnnnnnnnnnnnnnnnnnnnnnnnnnnnnnnnnnnnnnnnnnnnnnnnnnnnnnnnnnnnnnnnnnnnnnnnnnnnnnnnnnnnnnnnnnnnnnnnnnnnnnnnnnnnnnnnnnnnnnnnnnnnnnnnnnnnnnnnnnnnnnnnnnnnnnnnnnnnnnnnnnnnnnnnnnnnnnnnnnnnnnnnnnnnnnnnnnnnnnnnnnnnnnnnnnnnnnnnnnnnnnnnnnnnnnnnnnnnnnnnnnnnnnnnnnnnnnnnnnnnnnnnnnnnnnnnnnnnnnnnnnnnnnnnnnnnnnnnnnnnnnnnnnnnnnnnnnnnnnnnnnnnnnnnnnnnnnnnnnnnnnnnnnnnnnnnnnnnnnnnnnnnnnnnnnnnnnnnnnnnnnnnnnnnnnnnnnnnnnnnnnnnnnnnnnnnnnnnnnnnnnnnnnnnnnnnnnnnnnnnnnnnnnnnnnnnnnnnnnnnnnnnnnnnnnnnnnnnnnnnnnnnnnnnnnnnnnnnnnnnnnnnnnnnnnnnnnnnnnnnnnnnnnnnnnnnnnnnnnnnnnnnnnnnnnnnnnnnnnnnnnnnnnnnnnnnnnnnnnnnnnnnnnnnnnnnnnnnnnnnnnnnnnnnnnnnnnnnnnnnnnnnnnnnnnnnnnnnnnnnnnnnnnnnnnnnnnnnnnnnnnnnnnnnnnnnnnnnnnnnnnnnnnnnnnnnnnnnnnnnnnnnnnnnnnnnnnnnnnnnnnnnnnnnnnnnnnnnnnnnnnnnnnnnnnnnnnnnnnnnnnnnnnnnnnnnnnnnnnnnnnnnnnnnnnnnnnnnnnnnnnnnnnnnnnnnnnnnnnnnnnnnnnnnnnnnnnnnnnnnnnnnnnnnnnnnnnnnnnnnnnnnnnnnnnnnnnnnnnnnnnnnnnnnnnnnnnnnnnnnnnnnnnnnnnnnnnnnnnnnnnnnnnnnnnnnnnnnnnnnnnnnnnnnnnnnnnnnnnnnnnnnnnnnnnnnnnnnnnnnnnnnnnnnnnnnnnnnnnnnnnnnnnnnnnnnnnnnnnnnnnnnnnnnnnnnnnnnnnnnnnnnnnnnnnnnnnnnnnnnnnnnnnnnnnnnnnnnnnnnnnnnnnnnnnnnnnnnnnnnnnnnnnnnnnnnnnnnnnnnnnnnnnnnnnnnnnnnnnnnnnnnnnnnnnnnnnnnnnnnnnnnnnnnnnnnnnnnnnnnnnnnnnnnnnnnnnnnnnnnnnnnnnnnnnnnnnnnnnnnnnnnnnnnnnnnnnnnnnnnnnnnnnnnnnnnnnnnnnnnnnnnnnnnnnnnnnnnnnnnnnnnnnnnnnnnnnnnnnnnnnnnnnnnnnnnnnnnnnnnnnnnnnnnnnnnnnnnnnnnnnnnnnnnnnnnnnnnnnnnnnnnnnnnnnnnnnnnnnnnnnnnnnnnnnnnnnnnnnnnnnnnnnnnnnnnnnnnnnnnnnnnnnnnnnnnnnnnnnnnnnnnnnnnnnnnnnnnnnnnnnnnnnnnnnnnnnnnnnnnnnnnnnnnnnnnnnnnnnnnnnnnnnnnnnnnnnnnnnnnnnnnnnnnnnnnnnnnnnnnnnnnnnnnnnnnnnnnnnnnnnnnnnnnnnnnnnnnnnnnnnnnnnnnnnnnnnnnnnnnnnnnnnnnnnnnnnnnnnnnnnnnnnnnnnnnnnnnnnnnnnnnnnnnnnnnnnnnnnnnnnnnnnnnnnnnnnnnnnnnnnnnnnnnnnnnnnnnnnnnnnnnnnnnnnnnnnnnnnnnnnnnnnnnnnnnnnnnnnnnnnnnnnnnnnnnnnnnnnnnnnnnnnnnnnnnnnnnnnnnnnnnnnnnnnnnnnnnnnnnnnnnnnnnnnnnnnnnnnnnnnnnnnnnnnnnnnnnnnnnnnnnnnnnnnnnnnnnnnnnnnnnnnnnnnnnnnnnnnnnnnnnnnnnnnnnnnnnnnnnnnnnnnnnnnnnnnnnnnnnnnnnnnnnnnnnnnnnnnnnnnnnnnnnnnnnnnnnnnnnnnnnnnnnnnnnnnnnnnnnnnnnnnnnnnnnnnnnnnnnnnnnnnnnnnnnnnnnnnnnnnnnnnnnnnnnnnnnnnnnnnnnnnnnnnnnnnnnnnnnnnnnnnnnnnnnnnnnnnnnnnnnnnnnnnnnnnnnnnnnnnnnnnnnnnnnnnnnnnnnnnnnnnnnnnnnnnnnnnnnnnnnnnnnnnnnnnnnnnnnnnnnnnnnnnnnnnnnnnnnnnnnnnnnnnnnnnnnnnnnnnnnnnnnnnnnnnnnnnnnnnnnnnnnnnnnnnnnnnnnnnnnnnnnnnnnnnnnnnnnnnnnnnnnnnnnnnnnnnnnnnnnnnnnnnnnnnnnnnnnnnnnnnnnnnnnnnnnnnnnnnnnnnnnnnnnnnnnnnnnnnnnnnnnnnnnnnnnnnnnnnnnnnnnnnnnnnnnnnnnnnnnnnnnnnnnnnnnnnnnnnnnnnnnnnnnnnnnnnnnnnnnnnnnnnnnnnnnnnnnnnnnnnnnnnnnnnnnnnnnnnnnnnnnnnnnnnnnnnnnnnnnnnnnnnnnnnnnnnnnnnnnnnnnnnnnnnnnnnnnnnnnnnnnnnnnnnnnnnnnnnnnnnnnnnnnnnnnnnnnnnnnnnnnnnnnnnnnnnnnnnnnnnnnnnnnnnnnnnnnnnnnnnnnnnnnnnnnnnnnnnnnnnnnnnnnnnnnnnnnnnnnnnnnnnnnnnnnnnnnnnnnnnnnnnnnnnnnnnnnnnnnnnnnnnnnnnnnnnnnnnnnnnnnnnnnnnnnnnnnnnnnnnnnnnnnnnnnnnnnnnnnnnnnnnnnnnnnnnnnnnnnnnnnnnnnnnnnnnnnnnnnnnnnnnnnnnnnnnnnnnnnnnnnnnnnnnnnnnnnnnnnnnnnnnnnnnnnnnnnnnnnnnnnnnnnnnnnnnnnnnnnnnnnnnnnnnnnnnnnnnnnnnnnnnnnnnnnnnnnnnnnnnnnnnnnnnnnnnnnnnnnnnnnnnnnnnnnnnnnnnnnnnnnnnnnnnnnnnnnnnnnnnnnnnnnnnnnnnnnnnnnnnnnnnnnnnnnnnnnnnnnnnnnnnnnnnnnnnnnnnnnnnnnnnnnnnnnnnnnnnnnnnnnnnnnnnnnnnnnnnnnnnnnnnnnnnnnnnnnnnnnnnnnnnnnnnnnnnnnnnnnnnnnnnnnnnnnnnnnnnnnnnnnnnnnnnnnnnnnnnnnnnnnnnnnnnnnnnnnnnnnnnnnnnnnnnnnnnnnnnnnnnnnnnnnnnnnnnnnnnnnnnnnnnnnnnnnnnnnnnnnnnnnnnnnnnnnnnnnnnnnnnnnnnnnnnnnnnnnnnnnnnnnnnnnnnnnnnnnnnnnnnnnnnnnnnnnnnnnnnnnnnnnnnnnnnnnnnnnnnnnnnnnnnnnnnnnnnnnnnnnnnnnnnnnnnnnnnnnnnnnnnnnnnnnnnnnnnnnnnnnnnnnnnnnnnnnnnnnnnnnnnnnnnnnnnnnnnnnnnnnnnnnnnnnnnnnnnnnnnnnnnnnnnnnnnnnnnnnnnnnnnnnnnnnnnnnnnnnnnnnnnnnnnnnnnnnnnnnnnnnnnnnnnnnnnnnnnnnnnnnnnnnnnnnnnnnnnnnnnnnnnnnnnnnnnnnnnnnnnnnnnnnnnnnnnnnnnnnnnnnnnnnnnnnnnnnnnnnnnnnnnnnnnnnnnnnnnnnnnnnnnnnnnnnnnnnnnnnnnnnnnnnnnnnnnnnnnnnnnnnnnnnnnnnnnnnnnnnnnnnnnnnnnnnnnnnnnnnnnnnnnnnnnnnnnnnnnnnnnnnnnnnnnnnnnnnnnnnnnnnnnnnnnnnnnnnnnnnnnnnnnnnnnnnnnnnnnnnnnnnnnnnnnnnnnnnnnnnnnnnnnnnnnnnnnnnnnnnnnnnnnnnnnnnnnnnnnnnnnnnnnnnnnnnnnnnnnnnnnnnnnnnnnnnnnnnnnnnnnnnnnnnnnnnnnnnnnnnnnnnnnnnnnnnnnnnnnnnnnnnnnnnnnnnnnnnnnnnnnnnnnnnnnnnnnnnnnnnnnnnnnnnnnnnnnnnnnnnnnnnnnnnnnnnnnnnnnnnnnnnnnnnnnnnnnnnnnnnnnnnnnnnnnnnnnnnnnnnnnnnnnnnnnnnnnnnnnnnnnnnnnnnnnnnnnnnnnnnnnnnnnnnnnnnnnnnnnnnnnnnnnnnnnnnnnnnnnnnnnnnnnnnnnnnnnnnnnnnnnnnnnnnnnnnnnnnnnnnnnnnnnnnnnnnnnnnnnnnnnnnnnnnnnnnnnnnnnnnnnnnnnnnnnnnnnnnnnnnnnnnnnnnnnnnnnnnnnnnnnnnnnnnnnnnnnnnnnnnnnnnnnnnnnnnnnnnnnnnnnnnnnnnnnnnnnnnnnnnnnnnnnnnnnnnnnnnnnnnnnnnnnnnnnnnnnnnnnnnnnnnnnnnnnnnnnnnnnnnnnnnnnnnnnnnnnnnnnnnnnnnnnnnnnnnnnnnnnnnnnnnnnnnnnnnnnnnnnnnnnnnnnnnnnnnnnnnnnnnnnnnnnnnnnnnnnnnnnnnnnnnnnnnnnnnnnnnnnnnnnnnnnnnnnnnnnnnnnnnnnnnnnnnnnnnnnnnnnnnnnnnnnnnnnnnnnnnnnnnnnnnnnnnnnnnnnnnnnnnnnnnnnnnnnnnnnnnnnnnnnnnnnnnnnnnnnnnnnnnnnnnnnnnnnnnnnnnnnnnnnnnnnnnnnnnnnnnnnnnnnnnnnnnnnnnnnnnnnnnnnnnnnnnnnnnnnnnnnnnnnnnnnnnnnnnnnnnnnnnnnnnnnnnnnnnnnnnnnnnnnnnnnnnnnnnnnnnnnnnnnnnnnnnnnnnnnnnnnnnnnnnnnnnnnnnnnnnnnnnnnnnnnnnnnnnnnnnnnnnnnnnnnnnnnnnnnnnnnnnnnnnnnnnnnnnnnnnnnnnnnnnnnnnnnnnnnnnnnnnnnnnnnnnnnnnnnnnnnnnnnnnnnnnnnnnnnnnnnnnnnnnnnnnnnnnnnnnnnnnnnnnnnnnnnnnnnnnnnnnnnnnnnnnnnnnnnnnnnnnnnnnnnnnnnnnnnnnnnnnnnnnnnnnnnnnnnnnnnnnnnnnnnnnnnnnnnnnnnnnnnnnnnnnnnnnnnnnnnnnnnnnnnnnnnnnnnnnnnnnnnnnnnnnnnnnnnnnnnnnnnnnnnnnnnnnnnnnnnnnnnnnnnnnnnnnnnnnnnnnnnnnnnnnnnnnnnnnnnnnnnnnnnnnnnnnnnnnnnnnnnnnnnnnnnnnnnnnnnnnnnnnnnnnnnnnnnnnnnnnnnnnnnnnnnnnnnnnnnnnnnnnnnnnnnnnnnnnnnnnnnnnnnnnnnnnnnnnnnnnnnnnnnnnnnnnnnnnnnnnnnnnnnnnnnnnnnnnnnnnnnnnnnnnnnnnnnnnnnnnnnnnnnnnnnnnnnnnnnnnnnnnnnnnnnnnnnnnnnnnnnnnnnnnnnnnnnnnnnnnnnnnnnnnnnnnnnnnnnnnnnnnnnnnnnnnnnnnnnnnnnnnnnnnnnnnnnnnnnnnnnnnnnnnnnnnnnnnnnnnnnnnnnnnnnnnnnnnnnnnnnnnnnnnnnnnnnnnnnnnnnnnnnnnnnnnnnnnnnnnnnnnnnnnnnnnnnnnnnnnnnnnnnnnnnnnnnnnnnnnnnnnnnnnnnnnnnnnnnnnnnnnnnnnnnnnnnnnnnnnnnnnnnnnnnnnnnnnnnnnnnnnnnnnnnnnnnnnnnnnnnnnnnnnnnnnnnnnnnnnnnnnnnnnnnnnnnnnnnnnnnnnnnnnnnnnnnnnnnnnnnnnnnnnnnnnnnnnnnnnnnnnnnnnnnnnnnnnnnnnnnnnnnnnnnnnnnnnnnnnnnnnnnnnnnnnnnnnnnnnnnnnnnnnnnnnnnnnnnnnnnnnnnnnnnnnnnnnnnnnnnnnnnnnnnnnnnnnnnnnnnnnnnnnnnnnnnnnnnnnnnnnnnnnnnnnnnnnnnnnnnnnnnnnnnnnnnnnnnnnnnnnnnnnnnnnnnnnnnnnnnnnnnnnnnnnnnnnnnnnnnnnnnnnnnnnnnnnnnnnnnnnnnnnnnnnnnnnnnnnnnnnnnnnnnnnnnnnnnnnnnnnnnnnnnnnnnnnnnnnnnnnnnnnnnnnnnnnnnnnnnnnnnnnnnnnnnnnnnnnnnnnnnnnnnnnnnnnnnnnnnnnnnnnnnnnnnnnnnnnnnnnnnnnnnnnnnnnnnnnnnnnnnnnnnnnnnnnnnnnnnnnnnnnnnnnnnnnnnnnnnnnnnnnnnnnnnnnnnnnnnnnnnnnnnnnnnnnnnnnnnnnnnnnnnnnnnnnnnnnnnnnnnnnnnnnnnnnnnnnnnnnnnnnnnnnnnnnnnnnnnnnnnnnnnnnnnnnnnnnnnnnnnnnnnnnnnnnnnnnnnnnnnnnnnnnnnnnnnnnnnnnnnnnnnnnnnnnnnnnnnnnnnnnnnnnnnnnnnnnnnnnnnnnnnnnnnnnnnnnnnnnnnnnnnnnnnnnnnnnnnnnnnnnnnnnnnnnnnnnnnnnnnnnnnnnnnnnnnnnnnnnnnnnnnnnnnnnnnnnnnnnnnnnnnnnnnnnnnnnnnnnnnnnnnnnnnnnnnnnnnnnnnnnnnnnnnnnnnnnnnnnnnnnnnnnnnnnnnnnnnnnnnnnnnnnnnnnnnnnnnnnnnnnnnnnnnnnnnnnnnnnnnnnnnnnnnnnnnnnnnnnnnnnnnnnnnnnnnnnnnnnnnnnnnnnnnnnnnnnnnnnnnnnnnnnnnnnnnnnnnnnnnnnnnnnnnnnnnnnnnnnnnnnnnnnnnnnnnnnnnnnnnnnnnnnnnnnnnnnnnnnnnnnnnnnnnnnnnnnnnnnnnnnnnnnnnnnnnnnnnnnnnnnnnnnnnnnnnnnnnnnnnnnnnnnnnnnnnnnnnnnnnnnnnnnnnnnnnnnnnnnnnnnnnnnnnnnnnnnnnnnnnnnnnnnnnnnnnnnnnnnnnnnnnnnnnnnnnnnnnnnnnnnnnnnnnnnnnnnnnnnnnnnnnnnnnnnnnnnnnnnnnnnnnnnnnnnnnnnnnnnnnnnnnnnnnnnnnnnnnnnnnnnnnnnnnnnnnnnnnnnnnnnnnnnnnnnnnnnnnnnnnnnnnnnnnnnnnnnnnnnnnnnnnnnnnnnnnnnnnnnnnnnnnnnnnnnnnnnnnnnnnnnnnnnnnnnnnnnnnnnnnnnnnnnnnnnnnnnnnnnnnnnnnnnnnnnnnnnnnnnnnnnnnnnnnnnnnnnnnnnnnnnnnnnnnnnnnnnnnnnnnnnnnnnnnnnnnnnnnnnnnnnnnnnnnnnnnnnnnnnnnnnnnnnnnnnnnnnnnnnnnnnnnnnnnnnnnnnnnnnnnnnnnnnnnnnnnnnnnnnnnnnnnnnnnnnnnnnnnnnnnnnnnnnnnnnnnnnnnnnnnnnnnnnnnnnnnnnnnnnnnnnnnnnnnnnnnnnnnnnnnnnnnnnnnnnnnnnnnnnnnnnnnnnnnnnnnnnnnnnnnnnnnnnnnnnnnnnnnnnnnnnnnnnnnnnnnnnnnnnnnnnnnnnnnnnnnnnnnnnnnnnnnnnnnnnnnnnnnnnnnnnnnnnnnnnnnnnnnnnnnnnnnnnnnnnnnnnnnnnnnnnnnnnnnnnnnnnnnnnnnnnnnnnnnnnnnnnnnnnnnnnnnnnnnnnnnnnnnnnnnnnnnnnnnnnnnnnnnnnnnnnnnnnnnnnnnnnnnnnnnnnnnnnnnnnnnnnnnnnnnnnnnnnnnnnnnnnnnnnnnnnnnnnnnnnnnnnnnnnnnnnnnnnnnnnnnnnnnnnnnnnnnnnnnnnnnnnnnnnnnnnnnnnnnnnnnnnnnnnnnnnnnnnnnnnnnnnnnnnnnnnnnnnnnnnnnnnnnnnnnnnnnnnnnnnnnnnnnnnnnnnnnnnnnnnnnnnnnnnnnnnnnnnnnnnnnnnnnnnnnnnnnnnnnnnnnnnnnnnnnnnnnnnnnnnnnnnnnnnnnnnnnnnnnnnnnnnnnnnnnnnnnnnnnnnnnnnnnnnnnnnnnnnnnnnnnnnnnnnnnnnnnnnnnnnnnnnnnnnnnnnnnnnnnnnnnnnnnnnnnnnnnnnnnnnnnnnnnnnnnnnnnnnnnnnnnnnnnnnnnnnnnnnnnnnnnnnnnnnnnnnnnnnnnnnnnnnnnnnnnnnnnnnnnnnnnnnnnnnnnnnnnnnnnnnnnnnnnnnnnnnnnnnnnnnnnnnnnnnnnnnnnnnnnnnnnnnnnnnnnnnnnnnnnnnnnnnnnnnnnnnnnnnnnnnnnnnnnnnnnnnnnnnnnnnnnnnnnnnnnnnnnnnnnnnnnnnnnnnnnnnnnnnnnnnnnnnnnnnnnnnnnnnnnnnnnnnnnnnnnnnnnnnnnnnnnnnnnnnnnnnnnnnnnnnnnnnnnnnnnnnnnnnnnnnnnnnnnnnnnnnnnnnnnnnnnnnnnnnnnnnnnnnnnnnnnnnnnnnnnnnnnnnnnnnnnnnnnnnnnnnnnnnnnnnnnnnnnnnnnnnnnnnnnnnnnnnnnnnnnnnnnnnnnnnnnnnnnnnnnnnnnnnnnnnnnnnnnnnnnnnnnnnnnnnnnnnnnnnnnnnnnnnnnnnnnnnnnnnnnnnnnnnnnnnnnnnnnnnnnnnnnnnnnnnnnnnnnnnnnnnnnnnnnnnnnnnnnnnnnnnnnnnnnnnnnnnnnnnnnnnnnnnnnnnnnnnnnnnnnnnnnnnnnnnnnnnnnnnnnnnnnnnnnnnnnnnnnnnnnnnnnnnnnnnnnnnnnnnnnnnnnnnnnnnnnnnnnnnnnnnnnnnnnnnnnnnnnnnnnnnnnnnnnnnnnnnnnnnnnnnnnnnnnnnnnnnnnnnnnnnnnnnnnnnnnnnnnnnnnnnnnnnnnnnnnnnnnnnnnnnnnnnnnnnnnnnnnnnnnnnnnnnnnnnnnnnnnnnnnnnnnnnnnnnnnnnnnnnnnnnnnnnnnnnnnnnnnnnnnnnnnnnnnnnnnnnnnnnnnnnnnnnnnnnnnnnnnnnnnnnnnnnnnnnnnnnnnnnnnnnnnnnnnnnnnnnnnnnnnnnnnnnnnnnnnnnnnnnnnnnnnnnnnnnnnnnnnnnnnnnnnnnnnnnnnnnnnnnnnnnnnnnnnnnnnnnnnnnnnnnnnnnnnnnnnnnnnnnnnnnnnnnnnnnnnnnnnnnnnnnnnnnnnnnnnnnnnnnnnnnnnnnnnnnnnnnnnnnnnnnnnnnnnnnnnnnnnnnnnnnnnnnnnnnnnnnnnnnnnnnnnnnnnnnnnnnnnnnnnnnnnnnnnnnnnnnnnnnnnnnnnnnnnnnnnnnnnnnnnnnnnnnnnnnnnnnnnnnnnnnnnnnnnnnnnnnnnnnnnnnnnnnnnnnnnnnnnnnnnnnnnnnnnnnnnnnnnnnnnnnnnnnnnnnnnnnnnnnnnnnnnnnnnnnnnnnnnnnnnnnnnnnnnnnnnnnnnnnnnnnnnnnnnnnnnnnnnnnnnnnnnnnnnnnnnnnnnnnnnnnnnnnnnnnnnnnnnnnnnnnnnnnnnnnnnnnnnnnnnnnnnnnnnnnnnnnnnnnnnnnnnnnnnnnnnnnnnnnnnnnnnnnnnnnnnnnnnnnnnnnnnnnnnnnnnnnnnnnnnnnnnnnnnnnnnnnnnnnnnnnnnnnnnnnnnnnnnnnnnnnnnnnnnnnnnnnnnnnnnnnnnnnnnnnnnnnnnnnnnnnnnnnnnnnnnnnnnnnnnnnnnnnnnnnnnnnnnnnnnnnnnnnnnnnnnnnnnnnnnnnnnnnnnnnnnnnnnnnnnnnnnnnnnnnnnnnnnnnnnnnnnnnnnnnnnnnnnnnnnnnnnnnnnnnnnnnnnnnnnnnnnnnnnnnnnnnnnnnnnnnnnnnnnnnnnnnnnnnnnnnnnnnnnnnnnnnnnnnnnnnnnnnnnnnnnnnnnnnnnnnnnnnnnnnnnnnnnnnnnnnnnnnnnnnnnnnnnnnnnnnnnnnnnnnnnnnnnnnnnnnnnnnnnnnnnnnnnnnnnnnnnnnnnnnnnnnnnnnnnnnnnnnnnnnnnnnnnnnnnnnnnnnnnnnnnnnnnnnnnnnnnnnnnnnnnnnnnnnnnnnnnnnnnnnnnnnnnnnnnnnnnnnnnnnnnnnnnnnnnnnnnnnnnnnnnnnnnnnnnnnnnnnnnnnnnnnnnnnnnnnnnnnnnnnnnnnnnnnnnnnnnnnnnnnnnnnnnnnnnnnnnnnnnnnnnnnnnnnnnnnnnnnnnnnnnnnnnnnnnnnnnnnnnnnnnnnnnnnnnnnnnnnnnnnnnnnnnnnnnnnnnnnnnnnnnnnnnnnnnnnnnnnnnnnnnnnnnnnnnnnnnnnnnnnnnnnnnnnnnnnnnnnnnnnnnnnnnnnnnnnnnnnnnnnnnnnnnnnnnnnnnnnnnnnnnnnnnnnnnnnnnnnnnnnnnnnnnnnnnnnnnnnnnnnnnnnnnnnnnnnnnnnnnnnnnnnnnnnnnnnnnnnnnnnnnnnnnnnnnnnnnnnnnnnnnnnnnnnnnnnnnnnnnnnnnnnnnnnnnnnnnnnnnnnnnnnnnnnnnnnnnnnnnnnnnnnnnnnnnnnnnnnnnnnnnnnnnnnnnnnnnnnnnnnnnnnnnnnnnnnnnnnnnnnnnnnnnnnnnnnnnnnnnnnnnnnnnnnnnnnnnnnnnnnnnnnnnnnnnnnnnnnnnnnnnnnnnnnnnnnnnnnnnnnnnnnnnnnnnnnnnnnnnnnnnnnnnnnnnnnnnnnnnnnnnnnnnnnnnnnnnnnnnnnnnnnnnnnnnnnnnnnnnnnnnnnnnnnnnnnnnnnnnnnnnnnnnnnnnnnnnnnnnnnnnnnnnnnnnnnnnnnnnnnnnnnnnnnnnnnnnnnnnnnnnnnnnnnnnnnnnnnnnnnnnnnnnnnnnnnnnnnnnnnnnnnnnnnnnnnnnnnnnnnnnnnnnnnnnnnnnnnnnnnnnnnnnnnnnnnnnnnnnnnnnnnnnnnnnnnnnnnnnnnnnnnnnnnnnnnnnnnnnnnnnnnnnnnnnnnnnnnnnnnnnnnnnnnnnnnnnnnnnnnnnnnnnnnnnnnnnnnnnnnnnnnnnnnnnnnnnnnnnnnnnnnnnnnnnnnnnnnnnnnnnnnnnnnnnnnnnnnnnnnnnnnnnnnnnnnnnnnnnnnnnnnnnnnnnnnnnnnnnnnnnnnnnnnnnnnnnnnnnnnnnnnnnnnnnnnnnnnnnnnnnnnnnnnnnnnnnnnnnnnnnnnnnnnnnnnnnnnnnnnnnnnnnnnnnnnnnnnnnnnnnnnnnnnnnnnnnnnnnnnnnnnnnnnnnnnnnnnnnnnnnnnnnnnnnnnnnnnnnnnnnnnnnnnnnnnnnnnnnnnnnnnnnnnnnnnnnnnnnnnnnnnnnnnnnnnnnnnnnnnnnnnnnnnnnnnnnnnnnnnnnnnnnnnnnnnnnnnnnnnnnnnnnnnnnnnnnnnnnnnnnnnnnnnnnnnnnnnnnnnnnnnnnnnnnnnnnnnnnnnnnnnnnnnnnnnnnnnnnnnnnnnnnnnnnnnnnnnnnnnnnnnnnnnnnnnnnnnnnnnnnnnnnnnnnnnnnnnnnnnnnnnnnnnnnnnnnnnnnnnnnnnnnnnnnnnnnnnnnnnnnnnnnnnnnnnnnnnnnnnnnnnnnnnnnnnnnnnnnnnnnnnnnnnnnnnnnnnnnnnnnnnnnnnnnnnnnnnnnnnnnnnnnnnnnnnnnnnnnnnnnnnnnnnnnnnnnnnnnnnnnnnnnnnnnnnnnnnnnnnnnnnnnnnnnnnnnnnnnnnnnnnnnnnnnnnnnnnnnnnnnnnnnnnnnnnnnnnnnnnnnnnnnnnnnnnnnnnnnnnnnnnnnnnnnnnnnnnnnnnnnnnnnnnnnnnnnnnnnnnnnnnnnnnnnnnnnnnnnnnnnnnnnnnnnnnnnnnnnnnnnnnnnnnnnnnnnnnnnnnnnnnnnnnnnnnnnnnnnnnnnnnnnnnnnnnnnnnnnnnnnnnnnnnnnnnnnnnnnnnnnnnnnnnnnnnnnnnnnnnnnnnnnnnnnnnnnnnnnnnnnnnnnnnnnnnnnnnnnnnnnnnnnnnnnnnnnnnnnnnnnnnnnnnnnnnnnnnnnnnnnnnnnnnnnnnnnnnnnnnnnnnnnnnnnnnnnnnnnnnnnnnnnnnnnnnnnnnnnnnnnnnnnnnnnnnnnnnnnnnnnnnnnnnnnnnnnnnnnnnnnnnnnnnnnnnnnnnnnnnnnnnnnnnnnnnnnnnnnnnnnnnnnnnnnnnnnnnnnnnnnnnnnnnnnnnnnnnnnnnnnnnnnnnnnnnnnnnnnnnnnnnnnnnnnnnnnnnnnnnnnnnnnnnnnnnnnnnnnnnnnnnnnnnnnnnnnnnnnnnnnnnnnnnnnnnnnnnnnnnnnnnnnnnnnnnnnnnnnnnnnnnnnnnnnnnnnnnnnnnnnnnnnnnnnnnnnnnnnnnnnnnnnnnnnnnnnnnnnnnnnnnnnnnnnnnnnnnnnnnnnnnnnnnnnnnnnnnnnnnnnnnnnnnnnnnnnnnnnnnnnnnnnnnnnnnnnnnnnnnnnnnnnnnnnnnnnnnnnnnnnnnnnnnnnnnnnnnnnnnnnnnnnnnnnnnnnnnnnnnnnnnnnnnnnnnnnnnnnnnnnnnnnnnnnnnnnnnnnnnnnnnnnnnnnnnnnnnnnnnnnnnnnnnnnnnnnnnnnnnnnnnnnnnnnnnnnnnnnnnnnnnnnnnnnnnnnnnnnnnnnnnnnnnnnnnnnnnnnnnnnnnnnnnnnnnnnnnnnnnnnnnnnnnnnnnnnnnnnnnnnnnnnnnnnnnnnnnnnnnnnnnnnnnnnnnnnnnnnnnnnnnnnnnnnnnnnnnnnnnnnnnnnnnnnnnnnnnnnnnnnnnnnnnnnnnnnnnnnnnnnnnnnnnnnnnnnnnnnnnnnnnnnnnnnnnnnnnnnnnnnnnnnnnnnnnnnnnnnnnnnnnnnnnnnnnnnnnnnnnnnnnnnnnnnnnnnnnnnnnnnnnnnnnnnnnnnnnnnnnnnnnnnnnnnnnnnnnnnnnnnnnnnnnnnnnnnnnnnnnnnnnnnnnnnnnnnnnnnnnnnnnnnnnnnnnnnnnnnnnnnnnnnnnnnnnnnnnnnnnnnnnnnnnnnnnnnnnnnnnnnnnnnnnnnnnnnnnnnnnnnnnnnnnnnnnnnnnnnnnnnnnnnnnnnnnnnnnnnnnnnnnnnnnnnnnnnnnnnnnnnnnnnnnnnnnnnnnnnnnnnnnnnnnnnnnnnnnnnnnnnnnnnnnnnnnnnnnnnnnnnnnnnnnnnnnnnnnnnnnnnnnnnnnnnnnnnnnnnnnnnnnnnnnnnnnnnnnnnnnnnnnnnnnnnnnnnnnnnnnnnnnnnnnnnnnnnnnnnnnnnnnnnnnnnnnnnnnnnnnnnnnnnnnnnnnnnnnnnnnnnnnnnnnnnnnnnnnnnnnnnnnnnnnnnnnnnnnnnnnnnnnnnnnnnnnnnnnnnnnnnnnnnnnnnnnnnnnnnnnnnnnnnnnnnnnnnnnnnnnnnnnnnnnnnnnnnnnnnnnnnnnnnnnnnnnnnnnnnnnnnnnnnnnnnnnnnnnnnnnnnnnnnnnnnnnnnnnnnnnnnnnnnnnnnnnnnnnnnnnnnnnnnnnnnnnnnnnnnnnnnnnnnnnnnnnnnnnnnnnnnnnnnnnnnnnnnnnnnnnnnnnnnnnnnnnnnnnnnnnnnnnnnnnnnnnnnnnnnnnnnnnnnnnnnnnnnnnnnnnnnnnnnnnnnnnnnnnnnnnnnnnnnnnnnnnnnnnnnnnnnnnnnnnnnnnnnnnnnnnnnnnnnnnnnnnnnnnnnnnnnnnnnnnnnnnnnnnnnnnnnnnnnnnnnnnnnnnnnnnnnnnnnnnnnnnnnnnnnnnnnnnnnnnnnnnnnnnnnnnnnnnnnnnnnnnnnnnnnnnnnnnnnnnnnnnnnnnnnnnnnnnnnnnnnnnnnnnnnnnnnnnnnnnnnnnnnnnnnnnnnnnnnnnnnnnnnnnnnnnnnnnnnnnnnnnnnnnnnnnnnnnnnnnnnnnnnnnnnnnnnnnnnnnnnnnnnnnnnnnnnnnnnnnnnnnnnnnnnnnnnnnnnnnnnnnnnnnnnnnnnnnnnnnnnnnnnnnnnnnnnnnnnnnnnnnnnnnnnnnnnnnnnnnnnnnnnnnnnnnnnnnnnnnnnnnnnnnnnnnnnnnnnnnnnnnnnnnnnnnnnnnnnnnnnnnnnnnnnnnnnnnnnnnnnnnnnnnnnnnnnnnnnnnnnnnnnnnnnnnnnnnnnnnnnnnnnnnnnnnnnnnnnnnnnnnnnnnnnnnnnnnnnnnnnnnnnnnnnnnnnnnnnnnnnnnnnnnnnnnnnnnnnnnnnnnnnnnnnnnnnnnnnnnnnnnnnnnnnnnnnnnnnnnnnnnnnnnnnnnnnnnnnnnnnnnnnnnnnnnnnnnnnnnnnnnnnnnnnnnnnnnnnnnnnnnnnnnnnnnnnnnnnnnnnnnnnnnnnnnnnnnnnnnnnnnnnnnnnnnnnnnnnnnnnnnnnnnnnnnnnnnnnnnnnnnnnnnnnnnnnnnnnnnnnnnnnnnnnnnnnnnnnnnnnnnnnnnnnnnnnnnnnnnnnnnnnnnnnnnnnnnnnnnnnnnnnnnnnnnnnnnnnnnnnnnnnnnnnnnnnnnnnnnnnnnnnnnnnnnnnnnnnnnnnnnnnnnnnnnnnnnnnnnnnnnnnnnnnnnnnnnnnnnnnnnnnnnnnnnnnnnnnnnnnnnnnnnnnnnnnnnnnnnnnnnnnnnnnnnnnnnnnnnnnnnnnnnnnnnnnnnnnnnnnnnnnnnnnnnnnnnnnnnnnnnnnnnnnnnnnnnnnnnnnnnnnnnnnnnnnnnnnnnnnnnnnnnnnnnnnnnnnnnnnnnnnnnnnnnnnnnnnnnnnnnnnnnnnnnnnnnnnnnnnnnnnnnnnnnnnnnnnnnnnnnnnnnnnnnnnnnnnnnnnnnnnnnnnnnnnnnnnnnnnnnnnnnnnnnnnnnnnnnnnnnnnnnnnnnnnnnnnnnnnnnnnnnnnnnnnnnnnnnnnnnnnnnnnnnnnnnnnnnnnnnnnnnnnnnnnnnnnnnnnnnnnnnnnnnnnnnnnnnnnnnnnnnnnnnnnnnnnnnnnnnnnnnnnnnnnnnnnnnnnnnnnnnnnnnnnnnnnnnnnnnnnnnnnnnnnnnnnnnnnnnnnnnnnnnnnnnnnnnnnnnnnnnnnnnnnnnnnnnnnnnnnnnnnnnnnnnnnnnnnnnnnnnnnnnnnnnnnnnnnnnnnnnnnnnnnnnnnnnnnnnnnnnnnnnnnnnnnnnnnnnnnnnnnnnnnnnnnnnnnnnnnnnnnnnnnnnnnnnnnnnnnnnnnnnnnnnnnnnnnnnnnnnnnnnnnnnnnnnnnnnnnnnnnnnnnnnnnnnnnnnnnnnnnnnnnnnnnnnnnnnnnnnnnnnnnnnnnnnnnnnnnnnnnnnnnnnnnnnnnnnnnnnnnnnnnnnnnnnnnnnnnnnnnnnnnnnnnnnnnnnnnnnnnnnnnnnnnnnnnnnnnnnnnnnnnnnnnnnnnnnnnnnnnnnnnnnnnnnnnnnnnnnnnnnnnnnnnnnnnnnnnnnnnnnnnnnnnnnnnnnnnnnnnnnnnnnnnnnnnnnnnnnnnnnnnnnnnnnnnnnnnnnnnnnnnnnnnnnnnnnnnnnnnnnnnnnnnnnnnnnnnnnnnnnnnnnnnnnnnnnnnnnnnnnnnnnnnnnnnnnnnnnnnnnnnnnnnnnnnnnnnnnnnnnnnnnnnnnnnnnnnnnnnnnnnnnnnnnnnnnnnnnnnnnnnnnnnnnnnnnnnnnnnnnnnnnnnnnnnnnnnnnnnnnnnnnnnnnnnnnnnnnnnnnnnnnnnnnnnnnnnnnnnnnnnnnnnnnnnnnnnnnnnnnnnnnnnnnnnnnnnnnnnnnnnnnnnnnnnnnnnnnnnnnnnnnnnnnnnnnnnnnnnnnnnnnnnnnnnnnnnnnnnnnnnnnnnnnnnnnnnnnnnnnnnnnnnnnnnnnnnnnnnnnnnnnnnnnnnnnnnnnnnnnnnnnnnnnnnnnnnnnnnnnnnnnnnnnnnnnnnnnnnnnnnnnnnnnnnnnnnnnnnnnnnnnnnnnnnnnnnnnnnnnnnnnnnnnnnnnnnnnnnnnnnnnnnnnnnnnnnnnnnnnnnnnnnnnnnnnnnnnnnnnnnnnnnnnnnnnnnnnnnnnnnnnnnnnnnnnnnnnnnnnnnnnnnnnnnnnnnnnnnnnnnnnnnnnnnnnnnnnnnnnnnnnnnnnnnnnnnnnnnnnnnnnnnnnnnnnnnnnnnnnnnnnnnnnnnnnnnnnnnnnnnnnnnnnnnnnnnnnnnnnnnnnnnnnnnnnnnnnnnnnnnnnnnnnnnnnnnnnnnnnnnnnnnnnnnnnnnnnnnnnnnnnnnnnnnnnnnnnnnnnnnnnnnnnnnnnnnnnnnnnnnnnnnnnnnnnnnnnnnnnnnnnnnnnnnnnnnnnnnnnnnnnnnnnnnnnnnnnnnnnnnnnnnnnnnnnnnnnnnnnnnnnnnnnnnnnnnnnnnnnnnnnnnnnnnnnnnnnnnnnnnnnnnnnnnnnnnnnnnnnnnnnnnnnnnnnnnnnnnnnnnnnnnnnnnnnnnnnnnnnnnnnnnnnnnnnnnnnnnnnnnnnnnnnnnnnnnnnnnnnnnnnnnnnnnnnnnnnnnnnnnnnnnnnnnnnnnnnnnnnnnnnnnnnnnnnnnnnnnnnnnnnnnnnnnnnnnnnnnnnnnnnnnnnnnnnnnnnnnnnnnnnnnnnnnnnnnnnnnnnnnnnnnnnnnnnnnnnnnnnnnnnnnnnnnnnnnnnnnnnnnnnnnnnnnnnnnnnnnnnnnnnnnnnnnnnnnnnnnnnnnnnnnnnnnnnnnnnnnnnnnnnnnnnnnnnnnnnnnnnnnnnnnnnnnnnnnnnnnnnnnnnnnnnnnnnnnnnnnnnnnnnnnnnnnnnnnnnnnnnnnnnnnnnnnnnnnnnnnnnnnnnnnnnnnnnnnnnnnnnnnnnnnnnnnnnnnnnnnnnnnnnnnnnnnnnnnnnnnnnnnnnnnnnnnnnnnnnnnnnnnnnnnnnnnnnnnnnnnnnnnnnnnnnnnnnnnnnnnnnnnnnnnnnnnnnnnnnnnnnnnnnnnnnnnnnnnnnnnnnnnnnnnnnnnnnnnnnnnnnnnnnnnnnnnnnnnnnnnnnnnnnnnnnnnnnnnnnnnnnnnnnnnnnnnnnnnnnnnnnnnnnnnnnnnnnnnnnnnnnnnnnnnnnnnnnnnnnnnnnnnnnnnnnnnnnnnnnnnnnnnnnnnnnnnnnnnnnnnnnnnnnnnnnnnnnnnnnnnnnnnnnnnnnnnnnnnnnnnnnnnnnnnnnnnnnnnnnnnnnnnnnnnnnnnnnnnnnnnnnnnnnnnnnnnnnnnnnnnnnnnnnnnnnnnnnnnnnnnnnnnnnnnnnnnnnnnnnnnnnnnnnnnnnnnnnnnnnnnnnnnnnnnnnnnnnnnnnnnnnnnnnnnnnnnnnnnnnnnnnnnnnnnnnnnnnnnnnnnnnnnnnnnnnnnnnnnnnnnnnnnnnnnnnnnnnnnnnnnnnnnnnnnnnnnnnnnnnnnnnnnnnnnnnnnnnnnnnnnnnnnnnnnnnnnnnnnnnnnnnnnnnnnnnnnnnnnnnnnnnnnnnnnnnnnnnnnnnnnnnnnnnnnnnnnnnnnnnnnnnnnnnnnnnnnnnnnnnnnnnnnnnnnnnnnnnnnnnnnnnnnnnnnnnnnnnnnnnnnnnnnnnnnnnnnnnnnnnnnnnnnnnnnnnnnnnnnnnnnnnnnnnnnnnnnnnnnnnnnnnnnnnnnnnnnnnnnnnnnnnnnnnnnnnnnnnnnnnnnnnnnnnnnnnnnnnnnnnnnnnnnnnnnnnnnnnnnnnnnnnnnnnnnnnnnnnnnnnnnnnnnnnnnnnnnnnnnnnnnnnnnnnnnnnnnnnnnnnnnnnnnnnnnnnnnnnnnnnnnnnnnnnnnnnnnnnnnnnnnnnnnnnnnnnnnnnnnnnnnnnnnnnnnnnnnnnnnnnnnnnnnnnnnnnnnnnnnnnnnnnnnnnnnnnnnnnnnnnnnnnnnnnnnnnnnnnnnnnnnnnnnnnnnnnnnnnnnnnnnnnnnnnnnnnnnnnnnnnnnnnnnnnnnnnnnnnnnnnnnnnnnnnnnnnnnnnnnnnnnnnnnnnnnnnnnnnnnnnnnnnnnnnnnnnnnnnnnnnnnnnnnnnnnnnnnnnnnnnnnnnnnnnnnnnnnnnnnnnnnnnnnnnnnnnnnnnnnnnnnnnnnnnnnnnnnnnnnnnnnnnnnnnnnnnnnnnnnnnnnnnnnnnnnnnnnnnnnnnnnnnnnnnnnnnnnnnnnnnnnnnnnnnnnnnnnnnnnnnnnnnnnnnnnnnnnnnnnnnnnnnnnnnnnnnnnnnnnnnnnnnnnnnnnnnnnnnnnnnnnnnnnnnnnnnnnnnnnnnnnnnnnnnnnnnnnnnnnnnnnnnnnnnnnnnnnnnnnnnnnnnnnnnnnnnnnnnnnnnnnnnnnnnnnnnnnnnnnnnnnnnnnnnnnnnnnnnnnnnnnnnnnnnnnnnnnnnnnnnnnnnnnnnnnnnnnnnnnnnnnnnnnnnnnnnnnnnnnnnnnnnnnnnnnnnnnnnnnnnnnnnnnnnnnnnnnnnnnnnnnnnnnnnnnnnnnnnnnnnnnnnnnnnnnnnnnnnnnnnnnnnnnnnnnnnnnnnnnnnnnnnnnnnnnnnnnnnnnnnnnnnnnnnnnnnnnnnnnnnnnnnnnnnnnnnnnnnnnnnnnnnnnnnnnnnnnnnnnnnnnnnnnnnnnnnnnnnnnnnnnnnnnnnnnnnnnnnnnnnnnnnnnnnnnnnnnnnnnnnnnnnnnnnnnnnnnnnnnnnnnnnnnnnnnnnnnnnnnnnnnnnnnnnnnnnnnnnnnnnnnnnnnnnnnnnnnnnnnnnnnnnnnnnnnnnnnnnnnnnnnnnnnnnnnnnnnnnnnnnnnnnnnnnnnnnnnnnnnnnnnnnnnnnnnnnnnnnnnnnnnnnnnnnnnnnnnnnnnnnnnnnnnnnnnnnnnnnnnnnnnnnnnnnnnnnnnnnnnnnnnnnnnnnnnnnnnnnnnnnnnnnnnnnnnnnnnnnnnnnnnnnnnnnnnnnnnnnnnnnnnnnnnnnnnnnnnnnnnnnnnnnnnnnnnnnnnnnnnnnnnnnnnnnnnnnnnnnnnnnnnnnnnnnnnnnnnnnnnnnnnnnnnnnnnnnnnnnnnnnnnnnnnnnnnnnnnnnnnnnnnnnnnnnnnnnnnnnnnnnnnnnnnnnnnnnnnnnnnnnnnnnnnnnnnnnnnnnnnnnnnnnnnnnnnnnnnnnnnnnnnnnnnnnnnnnnnnnnnnnnnnnnnnnnnnnnnnnnnnnnnnnnnnnnnnnnnnnnnnnnnnnnnnnnnnnnnnnnnnnnnnnnnnnnnnnnnnnnnnnnnnnnnnnnnnnnnnnnnnnnnnnnnnnnnnnnnnnnnnnnnnnnnnnnnnnnnnnnnnnnnnnnnnnnnnnnnnnnnnnnnnnnnnnnnnnnnnnnnnnnnnnnnnnnnnnnnnnnnnnnnnnnnnnnnnnnnnnnnnnnnnnnnnnnnnnnnnnnnnnnnnnnnnnnnnnnnnnnnnnnnnnnnnnnnnnnnnnnnnnnnnnnnnnnnnnnnnnnnnnnnnnnnnnnnnnnnnnnnnnnnnnnnnnnnnnnnnnnnnnnnnnnnnnnnnnnnnnnnnnnnnnnnnnnnnnnnnnnnnnnnnnnnnnnnnnnnnnnnnnnnnnnnnnnnnnnnnnnnnnnnnnnnnnnnnnnnnnnnnnnnnnnnnnnnnnnnnnnnnnnnnnnnnnnnnnnnnnnnnnnnnnnnnnnnnnnnnnnnnnnnnnnnnnnnnnnnnnnnnnnnnnnnnnnnnnnnnnnnnnnnnnnnnnnnnnnnnnnnnnnnnnnnnnnnnnnnnnnnnnnnnnnnnnnnnnnnnnnnnnnnnnnnnnnnnnnnnnnnnnnnnnnnnnnnnnnnnnnnnnnnnnnnnnnnnnnnnnnnnnnnnnnnnnnnnnnnnnnnnnnnnnnnnnnnnnnnnnnnnnnnnnnnnnnnnnnnnnnnnnnnnnnnnnnnnnnnnnnnnnnnnnnnnnnnnnnnnnnnnnnnnnnnnnnnnnnnnnnnnnnnnnnnnnnnnnnnnnnnnnnnnnnnnnnnnnnnnnnnnnnnnnnnnnnnnnnnnnnnnnnnnnnnnnnnnnnnnnnnnnnnnnnnnnnnnnnnnnnnnnnnnnnnnnnnnnnnnnnnnnnnnnnnnnnnnnnnnnnnnnnnnnnnnnnnnnnnnnnnnnnnnnnnnnnnnnnnnnnnnnnnnnnnnnnnnnnnnnnnnnnnnnnnnnnnnnnnnnnnnnnnnnnnnnnnnnnnnnnnnnnnnnnnnnnnnnnnnnnnnnnnnnnnnnnnnnnnnnnnnnnnnnnnnnnnnnnnnnnnnnnnnnnnnnnnnnnnnnnnnnnnnnnnnnnnnnnnnnnnnnnnnnnnnnnnnnnnnnnnnnnnnnnnnnnnnnnnnnnnnnnnnnnnnnnnnnnnnnnnnnnnnnnnnnnnnnnnnnnnnnnnnnnnnnnnnnnnnnnnnnnnnnnnnnnnnnnnnnnnnnnnnnnnnnnnnnnnnnnnnnnnnnnnnnnnnnnnnnnnnnnnnnnnnnnnnnnnnnnnnnnnnnnnnnnnnnnnnnnnnnnnnnnnnnnnnnnnnnnnnnnnnnnnnnnnnnnnnnnnnnnnnnnnnnnnnnnnnnnnnnnnnnnnnnnnnnnnnnnnnnnnnnnnnnnnnnnnnnnnnnnnnnnnnnnnnnnnnnnnnnnnnnnnnnnnnnnnnnnnnnnnnnnnnnnnnnnnnnnnnnnnnnnnnnnnnnnnnnnnnnnnnnnnnnnnnnnnnnnnnnnnnnnnnnnnnnnnnnnnnnnnnnnnnnnnnnnnnnnnnnnnnnnnnnnnnnnnnnnnnnnnnnnnnnnnnnnnnnnnnnnnnnnnnnnnnnnnnnnnnnnnnnnnnnnnnnnnnnnnnnnnnnnnnnnnnnnnnnnnnnnnnnnnnnnnnnnnnnnnnnnnnnnnnnnnnnnnnnnnnnnnnnnnnnnnnnnnnnnnnnnnnnnnnnnnnnnnnnnnnnnnnnnnnnnnnnnnnnnnnnnnnnnnnnnnnnnnnnnnnnnnnnnnnnnnnnnnnnnnnnnnnnnnnnnnnnnnnnnnnnnnnnnnnnnnnnnnnnnnnnnnnnnnnnnnnnnnnnnnnnnnnnnnnnnnnnnnnnnnnnnnnnnnnnnnnnnnnnnnnnnnnnnnnnnnnnnnnnnnnnnnnnnnnnnnnnnnnnnnnnnnnnnnnnnnnnnnnnnnnnnnnnnnnnnnnnnnnnnnnnnnnnnnnnnnnnnnnnnnnnnnnnnnnnnnnnnnnnnnnnnnnnnnnnnnnnnnnnnnnnnnnnnnnnnnnnnnnnnnnnnnnnnnnnnnnnnnnnnnnnnnnnnnnnnnnnnnnnnnnnnnnnnnnnnnnnnnnnnnnnnnnnnnnnnnnnnnnnnnnnnnnnnnnnnnnnnnnnnnnnnnnnnnnnnnnnnnnnnnnnnnnnnnnnnnnnnnnnnnnnnnnnnnnnnnnnnnnnnnnnnnnnnnnnnnnnnnnnnnnnnnnnnnnnnnnnnnnnnnnnnnnnnnnnnnnnnnnnnnnnnnnnnnnnnnnnnnnnnnnnnnnnnnnnnnnnnnnnnnnnnnnnnnnnnnnnnnnnnnnnnnnnnnnnnnnnnnnnnnnnnnnnnnnnnnnnnnnnnnnnnnnnnnnnnnnnnnnnnnnnnnnnnnnnnnnnnnnnnnnnnnnnnnnnnnnnnnnnnnnnnnnnnnnnnnnnnnnnnnnnnnnnnnnnnnnnnnnnnnnnnnnnnnnnnnnnnnnnnnnnnnnnnnnnnnnnnnnnnnnnnnnnnnnnnnnnnnnnnnnnnnnnnnnnnnnnnnnnnnnnnnnnnnnnnnnnnnnnnnnnnnnnnnnnnnnnnnnnnnnnnnnnnnnnnnnnnnnnnnnnnnnnnnnnnnnnnnnnnnnnnnnnnnnnnnnnnnnnnnnnnnnnnnnnnnnnnnnnnnnnnnnnnnnnnnnnnnnnnnnnnnnnnnnnnnnnnnnnnnnnnnnnnnnnnnnnnnnnnnnnnnnnnnnnnnnnnnnnnnnnnnnnnnnnnnnnnnnnnnnnnnnnnnnnnnnnnnnnnnnnnnnnnnnnnnnnnnnnnnnnnnnnnnnnnnnnnnnnnnnnnnnnnnnnnnnnnnnnnnnnnnnnnnnnnnnnnnnnnnnnnnnnnnnnnnnnnnnnnnnnnnnnnnnnnnnnnnnnnnnnnnnnnnnnnnnnnnnnnnnnnnnnnnnnnnnnnnnnnnnnnnnnnnnnnnnnnnnnnnnnnnnnnnnnnnnnnnnnnnnnnnnnnnnnnnnnnnnnnnnnnnnnnnnnnnnnnnnnnnnnnnnnnnnnnnnnnnnnnnnnnnnnnnnnnnnnnnnnnnnnnnnnnnnnnnnnnnnnnnnnnnnnnnnnnnnnnnnnnnnnnnnnnnnnnnnnnnnnnnnnnnnnnnnnnnnnnnnnnnnnnnnnnnnnnnnnnnnnnnnnnnnnnnnnnnnnnnnnnnnnnnnnnnnnnnnnnnnnnnnnnnnnnnnnnnnnnnnnnnnnnnnnnnnnnnnnnnnnnnnnnnnnnnnnnnnnnnnnnnnnnnnnnnnnnnnnnnnnnnnnnnnnnnnnnnnnnnnnnnnnnnnnnnnnnnnnnnnnnnnnnnnnnnnnnnnnnnnnnnnnnnnnnnnnnnnnnnnnnnnnnnnnnnnnnnnnnnnnnnnnnnnnnnnnnnnnnnnnnnnnnnnnnnnnnnnnnnnnnnnnnnnnnnnnnnnnnnnnnnnnnnnnnnnnnnnnnnnnnnnnnnnnnnnnnnnnnnnnnnnnnnnnnnnnnnnnnnnnnnnnnnnnnnnnnnnnnnnnnnnnnnnnnnnnnnnnnnnnnnnnnnnnnnnnnnnnnnnnnnnnnnnnnnnnnnnnnnnnnnnnnnnnnnnnnnnnnnnnnnnnnnnnnnnnnnnnnnnnnnnnnnnnnnnnnnnnnnnnnnnnnnnnnnnnnnnnnnnnnnnnnnnnnnnnnnnnnnnnnnnnnnnnnnnnnnnnnnnnnnnnnnnnnnnnnnnnnnnnnnnnnnnnnnnnnnnnnnnnnnnnnnnnnnnnnnnnnnnnnnnnnnnnnnnnnnnnnnnnnnnnnnnnnnnnnnnnnnnnnnnnnnnnnnnnnnnnnnnnnnnnnnnnnnnnnnnnnnnnnnnnnnnnnnnnnnnnnnnnnnnnnnnnnnnnnnnnnnnnnnnnnnnnnnnnnnnnnnnnnnnnnnnnnnnnnnnnnnnnnnnnnnnnnnnnnnnnnnnnnnnnnnnnnnnnnnnnnnnnnnnnnnnnnnnnnnnnnnnnnnnnnnnnnnnnnnnnnnnnnnnnnnnnnnnnnnnnnnnnnnnnnnnnnnnnnnnnnnnnnnnnnnnnnnnnnnnnnnnnnnnnnnnnnnnnnnnnnnnnnnnnnnnnnnnnnnnnnnnnnnnnnnnnnnnnnnnnnnnnnnnnnnnnnnnnnnnnnnnnnnnnnnnnnnnnnnnnnnnnnnnnnnnnnnnnnnnnnnnnnnnnnnnnnnnnnnnnnnnnnnnnnnnnnnnnnnnnnnnnnnnnnnnnnnnnnnnnnnnnnnnnnnnnnnnnnnnnnnnnnnnnnnnnnnnnnnnnnnnnnnnnnnnnnnnnnnnnnnnnnnnnnnnnnnnnnnnnnnnnnnnnnnnnnnnnnnnnnnnnnnnnnnnnnnnnnnnnnnnnnnnnnnnnnnnnnnnnnnnnnnnnnnnnnnnnnnnnnnnnnnnnnnnnnnnnnnnnnnnnnnnnnnnnnnnnnnnnnnnnnnnnnnnnnnnnnnnnnnnnnnnnnnnnnnnnnnnnnnnnnnnnnnnnnnnnnnnnnnnnnnnnnnnnnnnnnnnnnnnnnnnnnnnnnnnnnnnnnnnnnnnnnnnnnnnnnnnnnnnnnnnnnnnnnnnnnnnnnnnnnnnnnnnnnnnnnnnnnnnnnnnnnnnnnnnnnnnnnnnnnnnnnnnnnnnnnnnnnnnnnnnnnnnnnnnnnnnnnnnnnnnnnnnnnnnnnnnnnnnnnnnnnnnnnnnnnnnnnnnnnnnnnnnnnnnnnnnnnnnnnnnnnnnnnnnnnnnnnnnnnnnnnnnnnnnnnnnnnnnnnnnnnnnnnnnnnnnnnnnnnnnnnnnnnnnnnnnnnnnnnnnnnnnnnnnnnnnnnnnnnnnnnnnnnnnnnnnnnnnnnnnnnnnnnnnnnnnnnnnnnnnnnnnnnnnnnnnnnnnnnnnnnnnnnnnnnnnnnnnnnnnnnnnnnnnnnnnnnnnnnnnnnnnnnnnnnnnnnnnnnnnnnnnnnnnnnnnnnnnnnnnnnnnnnnnnnnnnnnnnnnnnnnnnnnnnnnnnnnnnnnnnnnnnnnnnnnnnnnnnnnnnnnnnnnnnnnnnnnnnnnnnnnnnnnnnnnnnnnnnnnnnnnnnnnnnnnnnnnnnnnnnnnnnnnnnnnnnnnnnnnnnnnnnnnnnnnnnnnnnnnnnnnnnnnnnnnnnnnnnnnnnnnnnnnnnnnnnnnnnnnnnnnnnnnnnnnnnnnnnnnnnnnnnnnnnnnnnnnnnnnnnnnnnnnnnnnnnnnnnnnnnnnnnnnnnnnnnnnnnnnnnnnnnnnnnnnnnnnnnnnnnnnnnnnnnnnnnnnnnnnnnnnnnnnnnnnnnnnnnnnnnnnnnnnnnnnnnnnnnnnnnnnnnnnnnnnnnnnnnnnnnnnnnnnnnnnnnnnnnnnnnnnnnnnnnnnnnnnnnnnnnnnnnnnnnnnnnnnnnnnnnnnnnnnnnnnnnnnnnnnnnnnnnnnnnnnnnnnnnnnnnnnnnnnnnnnnnnnnnnnnnnnnnnnnnnnnnnnnnnnnnnnnnnnnnnnnnnnnnnnnnnnnnnnnnnnnnnnnnnnnnnnnnnnnnnnnnnnnnnnnnnnnnnnnnnnnnnnnnnnnnnnnnnnnnnnnnnnnnnnnnnnnnnnnnnnnnnnnnnnnnnnnnnnnnnnnnnnnnnnnnnnnnnnnnnnnnnnnnnnnnnnnnnnnnnnnnnnnnnnnnnnnnnnnnnnnnnnnnnnnnnnnnnnnnnnnnnnnnnnnnnnnnnnnnnnnnnnnnnnnnnnnnnnnnnnnnnnnnnnnnnnnnnnnnnnnnnnnnnnnnnnnnnnnnnnnnnnnnnnnnnnnnnnnnnnnnnnnnnnnnnnnnnnnnnnnnnnnnnnnnnnnnnnnnnnnnnnnnnnnnnnnnnnnnnnnnnnnnnnnnnnnnnnnnnnnnnnnnnnnnnnnnnnnnnnnnnnnnnnnnnnnnnnnnnnnnnnnnnnnnnnnnnnnnnnnnnnnnnnnnnnnnnnnnnnnnnnnnnnnnnnnnnnnnnnnnnnnnnnnnnnnnnnnnnnnnnnnnnnnnnnnnnnnnnnnnnnnnnnnnnnnnnnnnnnnnnnnnnnnnnnnnnnnnnnnnnnnnnnnnnnnnnnnnnnnnnnnnnnnnnnnnnnnnnnnnnnnnnnnnnnnnnnnnnnnnnnnnnnnnnnnnnnnnnnnnnnnnnnnnnnnnnnnnnnnnnnnnnnnnnnnnnnnnnnnnnnnnnnnnnnnnnnnnnnnnnnnnnnnnnnnnnnnnnnnnnnnnnnnnnnnnnnnnnnnnnnnnnnnnnnnnnnnnnnnnnnnnnnnnnnnnnnnnnnnnnnnnnnnnnnnnnnnnnnnnnnnnnnnnnnnnnnnnnnnnnnnnnnnnnnnnnnnnnnnnnnnnnnnnnnnnnnnnnnnnnnnnnnnnnnnnnnnnnnnnnnnnnnnnnnnnnnnnnnnnnnnnnnnnnnnnnnnnnnnnnnnnnnnnnnnnnnnnnnnnnnnnnnnnnnnnnnnnnnnnnnnnnnnnnnnnnnnnnnnnnnnnnnnnnnnnnnnnnnnnnnnnnnnnnnnnnnnnnnnnnnnnnnnnnnnnnnnnnnnnnnnnnnnnnnnnnnnnnnnnnnnnnnnnnnnnnnnnnnnnnnnnnnnnnnnnnnnnnnnnnnnnnnnnnnnnnnnnnnnnnnnnnnnnnnnnnnnnnnnnnnnnnnnnnnnnnnnnnnnnnnnnnnnnnnnnnnnnnnnnnnnnnnnnnnnnnnnnnnnnnnnnnnnnnnnnnnnnnnnnnnnnnnnnnnnnnnnnnnnnnnnnnnnnnnnnnnnnnnnnnnnnnnnnnnnnnnnnnnnnnnnnnnnnnnnnnnnnnnnnnnnnnnnnnnnnnnnnnnnnnnnnnnnnnnnnnnnnnnnnnnnnnnnnnnnnnnnnnnnnnnnnnnnnnnnnnnnnnnnnnnnnnnnnnnnnnnnnnnnnnnnnnnnnnnnnnnnnnnnnnnnnnnnnnnnnnnnnnnnnnnnnnnnnnnnnnnnnnnnnnnnnnnnnnnnnnnnnnnnnnnnnnnnnnnnnnnnnnnnnnnnnnnnnnnnnnnnnnnnnnnnnnnnnnnnnnnnnnnnnnnnnnnnnnnnnnnnnnnnnnnnnnnnnnnnnnnnnnnnnnnnnnnnnnnnnnnnnnnnnnnnnnnnnnnnnnnnnnnnnnnnnnnnnnnnnnnnnnnnnnnnnnnnnnnnnnnnnnnnnnnnnnnnnnnnnnnnnnnnnnnnnnnnnnnnnnnnnnnnnnnnnnnnnnnnnnnnnnnnnnnnnnnnnnnnnnnnnnnnnnnnnnnnnnnnnnnnnnnnnnnnnnnnnnnnnnnnnnnnnnnnnnnnnnnnnnnnnnnnnnnnnnnnnnnnnnnnnnnnnnnnnnnnnnnnnnnnnnnnnnnnnnnnnnnnnnnnnnnnnnnnnnnnnnnnnnnnnnnnnnnnnnnnnnnnnnnnnnnnnnnnnnnnnnnnnnnnnnnnnnnnnnnnnnnnnnnnnnnnnnnnnnnnnnnnnnnnnnnnnnnnnnnnnnnnnnnnnnnnnnnnnnnnnnnnnnnnnnnnnnnnnnnnnnnnnnnnnnnnnnnnnnnnnnnnnnnnnnnnnnnnnnnnnnnnnnnnnnnnnnnnnnnnnnnnnnnnnnnnnnnnnnnnnnnnnnnnnnnnnnnnnnnnnnnnnnnnnnnnnnnnnnnnnnnnnnnnnnnnnnnnnnnnnnnnnnnnnnnnnnnnnnnnnnnnnnnnnnnnnnnnnnnnnnnnnnnnnnnnnnnnnnnnnnnnnnnnnnnnnnnnnnnnnnnnnnnnnnnnnnnnnnnnnnnnnnnnnnnnnnnnnnnnnnnnnnnnnnnnnnnnnnnnnnnnnnnnnnnnnnnnnnnnnnnnnnnnnnnnnnnnnnnnnnnnnnnnnnnnnnnnnnnnnnnnnnnnnnnnnnnnnnnnnnnnnnnnnnnnnnnnnnnnnnnnnnnnnnnnnnnnnnnnnnnnnnnnnnnnnnnnnnnnnnnnnnnnnnnnnnnnnnnnnnnnnnnnnnnnnnnnnnnnnnnnnnnnnnnnnnnnnnnnnnnnnnnnnnnnnnnnnnnnnnnnnnnnnnnnnnnnnnnnnnnnnnnnnnnnnnnnnnnnnnnnnnnnnnnnnnnnnnnnnnnnnnnnnnnnnnnnnnnnnnnnnnnnnnnnnnnnnnnnnnnnnnnnnnnnnnnnnnnnnnnnnnnnnnnnnnnnnnnnnnnnnnnnnnnnnnnnnnnnnnnnnnnnnnnnnnnnnnnnnnnnnnnnnnnnnnnnnnnnnnnnnnnnnnnnnnnnnnnnnnnnnnnnnnnnnnnnnnnnnnnnnnnnnnnnnnnnnnnnnnnnnnnnnnnnnnnnnnnnnnnnnnnnnnnnnnnnnnnnnnnnnnnnnnnnnnnnnnnnnnnnnnnnnnnnnnnnnnnnnnnnnnnnnnnnnnnnnnnnnnnnnnnnnnnnnnnnnnnnnnnnnnnnnnnnnnnnnnnnnnnnnnnnnnnnnnnnnnnnnnnnnnnnnnnnnnnnnnnnnnnnnnnnnnnnnnnnnnnnnnnnnnnnnnnnnnnnnnnnnnnnnnnnnnnnnnnnnnnnnnnnnnnnnnnnnnnnnnnnnnnnnnnnnnnnnnnnnnnnnnnnnnnnnnnnnnnnnnnnnnnnnnnnnnnnnnnnnnnnnnnnnnnnnnnnnnnnnnnnnnnnnnnnnnnnnnnnnnnnnnnnnnnnnnnnnnnnnnnnnnnnnnnnnnnnnnnnnnnnnnnnnnnnnnnnnnnnnnnnnnnnnnnnnnnnnnnnnnnnnnnnnnnnnnnnnnnnnnnnnnnnnnnnnnnnnnnnnnnnnnnnnnnnnnnnnnnnnnnnnnnnnnnnnnnnnnnnnnnnnnnnnnnnnnnnnnnnnnnnnnnnnnnnnnnnnnnnnnnnnnnnnnnnnnnnnnnnnnnnnnnnnnnnnnnnnnnnnnnnnnnnnnnnnnnnnnnnnnnnnnnnnnnnnnnnnnnnnnnnnnnnnnnnnnnnnnnnnnnnnnnnnnnnnnnnnnnnnnnnnnnnnnnnnnnnnnnnnnnnnnnnnnnnnnnnnnnnnnnnnnnnnnnnnnnnnnnnnnnnnnnnnnnnnnnnnnnnnnnnnnnnnnnnnnnnnnnnnnnnnnnnnnnnnnnnnnnnnnnnnnnnnnnnnnnnnnnnnnnnnnnnnnnnnnnnnnnnnnnnnnnnnnnnnnnnnnnnnnnnnnnnnnnnnnnnnnnnnnnnnnnnnnnnnnnnnnnnnnnnnnnnnnnnnnnnnnnnnnnnnnnnnnnnnnnnnnnnnnnnnnnnnnnnnnnnnnnnnnnnnnnnnnnnnnnnnnnnnnnnnnnnnnnnnnnnnnnnnnnnnnnnnnnnnnnnnnnnnnnnnnnnnnnnnnnnnnnnnnnnnnnnnnnnnnnnnnnnnnnnnnnnnnnnnnnnnnnnnnnnnnnnnnnnnnnnnnnnnnnnnnnnnnnnnnnnnnnnnnnnnnnnnnnnnnnnnnnnnnnnnnnnnnnnnnnnnnnnnnnnnnnnnnnnnnnnnnnnnnnnnnnnnnnnnnnnnnnnnnnnnnnnnnnnnnnnnnnnnnnnnnnnnnnnnnnnnnnnnnnnnnnnnnnnnnnnnnnnnnnnnnnnnnnnnnnnnnnnnnnnnnnnnnnnnnnnnnnnnnnnnnnnnnnnnnnnnnnnnnnnnnnnnnnnnnnnnnnnnnnnnnnnnnnnnnnnnnnnnnnnnnnnnnnnnnnnnnnnnnnnnnnnnnnnnnnnnnnnnnnnnnnnnnnnnnnnnnnnnnnnnnnnnnnnnnnnnnnnnnnnnnnnnnnnnnnnnnnnnnnnnnnnnnnnnnnnnnnnnnnnnnnnnnnnnnnnnnnnnnnnnnnnnnnnnnnnnnnnnnnnnnnnnnnnnnnnnnnnnnnnnnnnnnnnnnnnnnnnnnnnnnnnnnnnnnnnnnnnnnnnnnnnnnnnnnnnnnnnnnnnnnnnnnnnnnnnnnnnnnnnnnnnnnnnnnnnnnnnnnnnnnnnnnnnnnnnnnnnnnnnnnnnnnnnnnnnnnnnnnnnnnnnnnnnnnnnnnnnnnnnnnnnnnnnnnnnnnnnnnnnnnnnnnnnnnnnnnnnnnnnnnnnnnnnnnnnnnnnnnnnnnnnnnnnnnnnnnnnnnnnnnnnnnnnnnnnnnnnnnnnnnnnnnnnnnnnnnnnnnnnnnnnnnnnnnnnnnnnnnnnnnnnnnnnnnnnnnnnnnnnnnnnnnnnnnnnnnnnnnnnnnnnnnnnnnnnnnnnnnnnnnnnnnnnnnnnnnnnnnnnnnnnnnnnnnnnnnnnnnnnnnnnnnnnnnnnnnnnnnnnnnnnnnnnnnnnnnnnnnnnnnnnnnnnnnnnnnnnnnnnnnnnnnnnnnnnnnnnnnnnnnnnnnnnnnnnnnnnnnnnnnnnnnnnnnnnnnnnnnnnnnnnnnnnnnnnnnnnnnnnnnnnnnnnnnnnnnnnnnnnnnnnnnnnnnnnnnnnnnnnnnnnnnnnnnnnnnnnnnnnnnnnnnnnnnnnnnnnnnnnnnnnnnnnnnnnnnnnnnnnnnnnnnnnnnnnnnnnnnnnnnnnnnnnnnnnnnnnnnnnnnnnnnnnnnnnnnnnnnnnnnnnnnnnnnnnnnnnnnnnnnnnnnnnnnnnnnnnnnnnnnnnnnnnnnnnnnnnnnnnnnnnnnnnnnnnnnnnnnnnnnnnnnnnnnnnnnnnnnnnnnnnnnnnnnnnnnnnnnnnnnnnnnnnnnnnnnnnnnnnnnnnnnnnnnnnnnnnnnnnnnnnnnnnnnnnnnnnnnnnnnnnnnnnnnnnnnnnnnnnnnnnnnnnnnnnnnnnnnnnnnnnnnnnnnnnnnnnnnnnnnnnnnnnnnnnnnnnnnnnnnnnnnnnnnnnnnnnnnnnnnnnnnnnnnnnnnnnnnnnnnnnnnnnnnnnnnnnnnnnnnnnnnnnnnnnnnnnnnnnnnnnnnnnnnnnnnnnnnnnnnnnnnnnnnnnnnnnnnnnnnnnnnnnnnnnnnnnnnnnnnnnnnnnnnnnnnnnnnnnnnnnnnnnnnnnnnnnnnnnnnnnnnnnnnnnnnnnnnnnnnnnnnnnnnnnnnnnnnnnnnnnnnnnnnnnnnnnnnnnnnnnnnnnnnnnnnnnnnnnnnnnnnnnnnnnnnnnnnnnnnnnnnnnnnnnnnnnnnnnnnnnnnnnnnnnnnnnnnnnnnnnnnnnnnnnnnnnnnnnnnnnnnnnnnnnnnnnnnnnnnnnnnnnnnnnnnnnnnnnnnnnnnnnnnnnnnnnnnnnnnnnnnnnnnnnnnnnnnnnnnnnnnnnnnnnnnnnnnnnnnnnnnnnnnnnnnnnnnnnnnnnnnnnnnnnnnnnnnnnnnnnnnnnnnnnnnnnnnnnnnnnnnnnnnnnnnnnnnnnnnnnnnnnnnnnnnnnnnnnnnnnnnnnnnnnnnnnnnnnnnnnnnnnnnnnnnnnnnnnnnnnnnnnnnnnnnnnnnnnnnnnnnnnnnnnnnnnnnnnnnnnnnnnnnnnnnnnnnnnnnnnnnnnnnnnnnnnnnnnnnnnnnnnnnnnnnnnnnnnnnnnnnnnnnnnnnnnnnnnnnnnnnnnnnnnnnnnnnnnnnnnnnnnnnnnnnnnnnnnnnnnnnnnnnnnnnnnnnnnnnnnnnnnnnnnnnnnnnnnnnnnnnnnnnnnnnnnnnnnnnnnnnnnnnnnnnnnnnnnnnnnnnnnnnnnnnnnnnnnnnnnnnnnnnnnnnnnnnnnnnnnnnnnnnnnnnnnnnnnnnnnnnnnnnnnnnnnnnnnnnnnnnnnnnnnnnnnnnnnnnnnnnnnnnnnnnnnnnnnnnnnnnnnnnnnnnnnnnnnnnnnnnnnnnnnnnnnnnnnnnnnnnnnnnnnnnnnnnnnnnnnnnnnnnnnnnnnnnnnnnnnnnnnnnnnnnnnnnnnnnnnnnnnnnnnnnnnnnnnnnnnnnnnnnnnnnnnnnnnnnnnnnnnnnnnnnnnnnnnnnnnnnnnnnnnnnnnnnnnnnnnnnnnnnnnnnnnnnnnnnnnnnnnnnnnnnnnnnnnnnnnnnnnnnnnnnnnnnnnnnnnnnnnnnnnnnnnnnnnnnnnnnnnnnnnnnnnnnnnnnnnnnnnnnnnnnnnnnnnnnnnnnnnnnnnnnnnnnnnnnnnnnnnnnnnnnnnnnnnnnnnnnnnnnnnnnnnnnnnnnnnnnnnnnnnnnnnnnnnnnnnnnnnnnnnnnnnnnnnnnnnnnnnnnnnnnnnnnnnnnnnnnnnnnnnnnnnnnnnnnnnnnnnnnnnnnnnnnnnnnnnnnnnnnnnnnnnnnnnnnnnnnnnnnnnnnnnnnnnnnnnnnnnnnnnnnnnnnnnnnnnnnnnnnnnnnnnnnnnnnnnnnnnnnnnnnnnnnnnnnnnnnnnnnnnnnnnnnnnnnnnnnnnnnnnnnnnnnnnnnnnnnnnnnnnnnnnnnnnnnnnnnnnnnnnnnnnnnnnnnnnnnnnnnnnnnnnnnnnnnnnnnnnnnnnnnnnnnnnnnnnnnnnnnnnnnnnnnnnnnnnnnnnnnnnnnnnnnnnnnnnnnnnnnnnnnnnnnnnnnnnnnnnnnnnnnnnnnnnnnnnnnnnnnnnnnnnnnnnnnnnnnnnnnnnnnnnnnnnnnnnnnnnnnnnnnnnnnnnnnnnnnnnnnnnnnnnnnnnnnnnnnnnnnnnnnnnnnnnnnnnnnnnnnnnnnnnnnnnnnnnnnnnnnnnnnnnnnnnnnnnnnnnnnnnnnnnnnnnnnnnnnnnnnnnnnnnnnnnnnnnnnnnnnnnnnnnnnnnnnnnnnnnnnnnnnnnnnnnnnnnnnnnnnnnnnnnnnnnnnnnnnnnnnnnnnnnnnnnnnnnnnnnnnnnnnnnnnnnnnnnnnnnnnnnnnnnnnnnnnnnnnnnnnnnnnnnnnnnnnnnnnnnnnnnnnnnnnnnnnnnnnnnnnnnnnnnnnnnnnnnnnnnnnnnnnnnnnnnnnnnnnnnnnnnnnnnnnnnnnnnnnnnnnnnnnnnnnnnnnnnnnnnnnnnnnnnnnnnnnnnnnnnnnnnnnnnnnnnnnnnnnnnnnnnnnnnnnnnnnnnnnnnnnnnnnnnnnnnnnnnnnnnnnnnnnnnnnnnnnnnnnnnnnnnnnnnnnnnnnnnnnnnnnnnnnnnnnnnnnnnnnnnnnnnnnnnnnnnnnnnnnnnnnnnnnnnnnnnnnnnnnnnnnnnnnnnnnnnnnnnnnnnnnnnnnnnnnnnnnnnnnnnnnnnnnnnnnnnnnnnnnnnnnnnnnnnnnnnnnnnnnnnnnnnnnnnnnnnnnnnnnnnnnnnnnnnnnnnnnnnnnnnnnnnnnnnnnnnnnnnnnnnnnnnnnnnnnnnnnnnnnnnnnnnnnnnnnnnnnnnnnnnnnnnnnnnnnnnnnnnnnnnnnnnnnnnnnnnnnnnnnnnnnnnnnnnnnnnnnnnnnnnnnnnnnnnnnnnnnnnnnnnnnnnnnnnnnnnnnnnnnnnnnnnnnnnnnnnnnnnnnnnnnnnnnnnnnnnnnnnnnnnnnnnnnnnnnnnnnnnnnnnnnnnnnnnnnnnnnnnnnnnnnnnnnnnnnnnnnnnnnnnnnnnnnnnnnnnnnnnnnnnnnnnnnnnnnnnnnnnnnnnnnnnnnnnnnnnnnnnnnnnnnnnnnnnnnnnnnnnnnnnnnnnnnnnnnnnnnnnnnnnnnnnnnnnnnnnnnnnnnnnnnnnnnnnnnnnnnnnnnnnnnnnnnnnnnnnnnnnnnnnnnnnnnnnnnnnnnnnnnnnnnnnnnnnnnnnnnnnnnnnnnnnnnnnnnnnnnnnnnnnnnnnnnnnnnnnnnnnnnnnnnnnnnnnnnnnnnnnnnnnnnnnnnnnnnnnnnnnnnnnnnnnnnnnnnnnnnnnnnnnnnnnnnnnnnnnnnnnnnnnnnnnnnnnnnnnnnnnnnnnnnnnnnnnnnnnnnnnnnnnnnnnnnnnnnnnnnnnnnnnnnnnnnnnnnnnnnnnnnnnnnnnnnnnnnnnnnnnnnnnnnnnnnnnnnnnnnnnnnnnnnnnnnnnnnnnnnnnnnnnnnnnnnnnnnnnnnnnnnnnnnnnnnnnnnnnnnnnnnnnnnnnnnnnnnnnnnnnnnnnnnnnnnnnnnnnnnnnnnnnnnnnnnnnnnnnnnnnnnnnnnnnnnnnnnnnnnnnnnnnnnnnnnnnnnnnnnnnnnnnnnnnnnnnnnnnnnnnnnnnnnnnnnnnnnnnnnnnnnnnnnnnnnnnnnnnnnnnnnnnnnnnnnnnnnnnnnnnnnnnnnnnnnnnnnnnnnnnnnnnnnnnnnnnnnnnnnnnnnnnnnnnnnnnnnnnnnnnnnnnnnnnnnnnnnnnnnnnnnnnnnnnnnnnnnnnnnnnnnnnnnnnnnnnnnnnnnnnnnnnnnnnnnnnnnnnnnnnnnnnnnnnnnnnnnnnnnnnnnnnnnnnnnnnnnnnnnnnnnnnnnnnnnnnnnnnnnnnnnnnnnnnnnnnnnnnnnnnnnnnnnnnnnnnnnnnnnnnnnnnnnnnnnnnnnnnnnnnnnnnnnnnnnnnnnnnnnnnnnnnnnnnnnnnnnnnnnnnnnnnnnnnnnnnnnnnnnnnnnnnnnnnnnnnnnnnnnnnnnnnnnnnnnnnnnnnnnnnnnnnnnnnnnnnnnnnnnnnnnnnnnnnnnnnnnnnnnnnnnnnnnnnnnnnnnnnnnnnnnnnnnnnnnnnnnnnnnnnnnnnnnnnnnnnnnnnnnnnnnnnnnnnnnnnnnnnnnnnnnnnnnnnnnnnnnnnnnnnnnnnnnnnnnnnnnnnnnnnnnnnnnnnnnnnnnnnnnnnnnnnnnnnnnnnnnnnnnnnnnnnnnnnnnnnnnnnnnnnnnnnnnnnnnnnnnnnnnnnnnnnnnnnnnnnnnnnnnnnnnnnnnnnnnnnnnnnnnnnnnnnnnnnnnnnnnnnnnnnnnnnnnnnnnnnnnnnnnnnnnnnnnnnnnnnnnnnnnnnnnnnnnnnnnnnnnnnnnnnnnnnnnnnnnnnnnnnnnnnnnnnnnnnnnnnnnnnnnnnnnnnnnnnnnnnnnnnnnnnnnnnnnnnnnnnnnnnnnnnnnnnnnnnnnnnnnnnnnnnnnnnnnnnnnnnnnnnnnnnnnnnnnnnnnnnnnnnnnnnnnnnnnnnnnnnnnnnnnnnnnnnnnnnnnnnnnnnnnnnnnnnnnnnnnnnnnnnnnnnnnnnnnnnnnnnnnnnnnnnnnnnnnnnnnnnnnnnnnnnnnnnnnnnnnnnnnnnnnnnnnnnnnnnnnnnnnnnnnnnnnnnnnnnnnnnnnnnnnnnnnnnnnnnnnnnnnnnnnnnnnnnnnnnnnnnnnnnnnnnnnnnnnnnnnnnnnnnnnnnnnnnnnnnnnnnnnnnnnnnnnnnnnnnnnnnnnnnnnnnnnnnnnnnnnnnnnnnnnnnnnnnnnnnnnnnnnnnnnnnnnnnnnnnnnnnnnnnnnnnnnnnnnnnnnnnnnnnnnnnnnnnnnnnnnnnnnnnnnnnnnnnnnnnnnnnnnnnnnnnnnnnnnnnnnnnnnnnnnnnnnnnnnnnnnnnnnnnnnnnnnnnnnnnnnnnnnnnnnnnnnnnnnnnnnnnnnnnnnnnnnnnnnnnnnnnnnnnnnnnnnnnnnnnnnnnnnnnnnnnnnnnnnnnnnnnnnnnnnnnnnnnnnnnnnnnnnnnnnnnnnnnnnnnnnnnnnnnnnnnnnnnnnnnnnnnnnnnnnnnnnnnnnnnnnnnnnnnnnnnnnnnnnnnnnnnnnnnnnnnnnnnnnnnnnnnnnnnnnnnnnnnnnnnnnnnnnnnnnnnnnnnnnnnnnnnnnnnnnnnnnnnnnnnnnnnnnnnnnnnnnnnnnnnnnnnnnnnnnnnnnnnnnnnnnnnnnnnnnnnnnnnnnnnnnnnnnnnnnnnnnnnnnnnnnnnnnnnnnnnnnnnnnnnnnnnnnnnnnnnnnnnnnnnnnnnnnnnnnnnnnnnnnnnnnnnnnnnnnnnnnnnnnnnnnnnnnnnnnnnnnnnnnnnnnnnnnnnnnnnnnnnnnnnnnnnnnnnnnnnnnnnnnnnnnnnnnnnnnnnnnnnnnnnnnnnnnnnnnnnnnnnnnnnnnnnnnnnnnnnnnnnnnnnnnnnnnnnnnnnnnnnnnnnnnnnnnnnnnnnnnnnnnnnnnnnnnnnnnnnnnnnnnnnnnnnnnnnnnnnnnnnnnnnnnnnnnnnnnnnnnnnnnnnnnnnnnnnnnnnnnnnnnnnnnnnnnnnnnnnnnnnnnnnnnnnnnnnnnnnnnnnnnnnnnnnnnnnnnnnnnnnnnnnnnnnnnnnnnnnnnnnnnnnnnnnnnnnnnnnnnnnnnnnnnnnnnnnnnnnnnnnnnnnnnnnnnnnnnnnnnnnnnnnnnnnnnnnnnnnnnnnnnnnnnnnnnnnnnnnnnnnnnnnnnnnnnnnnnnnnnnnnnnnnnnnnnnnnnnnnnnnnnnnnnnnnnnnnnnnnnnnnnnnnnnnnnnnnnnnnnnnnnnnnnnnnnnnnnnnnnnnnnnnnnnnnnnnnnnnnnnnnnnnnnnnnnnnnnnnnnnnnnnnnnnnnnnnnnnnnnnnnnnnnnnnnnnnnnnnnnnnnnnnnnnnnnnnnnnnnnnnnnnnnnnnnnnnnnnnnnnnnnnnnnnnnnnnnnnnnnnnnnnnnnnnnnnnnnnnnnnnnnnnnnnnnnnnnnnnnnnnnnnnnnnnnnnnnnnnnnnnnnnnnnnnnnnnnnnnnnnnnnnnnnnnnnnnnnnnnnnnnnnnnnnnnnnnnnnnnnnnnnnnnnnnnnnnnnnnnnnnnnnnnnnnnnnnnnnnnnnnnnnnnnnnnnnnnnnnnnnnnnnnnnnnnnnnnnnnnnnnnnnnnnnnnnnnnnnnnnnnnnnnnnnnnnnnnnnnnnnnnnnnnnnnnnnnnnnnnnnnnnnnnnnnnnnnnnnnnnnnnnnnnnnnnnnnnnnnnnnnnnnnnnnnnnnnnnnnnnnnnnnnnnnnnnnnnnnnnnnnnnnnnnnnnnnnnnnnnnnnnnnnnnnnnnnnnnnnnnnnnnnnnnnnnnnnnnnnnnnnnnnnnnnnnnnnnnnnnnnnnnnnnnnnnnnnnnnnnnnnnnnnnnnnnnnnnnnnnnnnnnnnnnnnnnnnnnnnnnnnnnnnnnnnnnnnnnnnnnnnnnnnnnnnnnnnnnnnnnnnnnnnnnnnnnnnnnnnnnnnnnnnnnnnnnnnnnnnnnnnnnnnnnnnnnnnnnnnnnnnnnnnnnnnnnnnnnnnnnnnnnnnnnnnnnnnnnnnnnnnnnnnnnnnnnnnnnnnnnnnnnnnnnnnnnnnnnnnnnnnnnnnnnnnnnnnnnnnnnnnnnnnnnnnnnnnnnnnnnnnnnnnnnnnnnnnnnnnnnnnnnnnnnnnnnnnnnnnnnnnnnnnnnnnnnnnnnnnnnnnnnnnnnnnnnnnnnnnnnnnnnnnnnnnnnnnnnnnnnnnnnnnnnnnnnnnnnnnnnnnnnnnnnnnnnnnnnnnnnnnnnnnnnnnnnnnnnnnnnnnnnnnnnnnnnnnnnnnnnnnnnnnnnnnnnnnnnnnnnnnnnnnnnnnnnnnnnnnnnnnnnnnnnnnnnnnnnnnnnnnnnnnnnnnnnnnnnnnnnnnnnnnnnnnnnnnnnnnnnnnnnnnnnnnnnnnnnnnnnnnnnnnnnnnnnnnnnnnnnnnnnnnnnnnnnnnnnnnnnnnnnnnnnnnnnnnnnnnnnnnnnnnnnnnnnnnnnnnnnnnnnnnnnnnnnnnnnnnnnnnnnnnnnnnnnnnnnnnnnnnnnnnnnnnnnnnnnnnnnnnnnnnnnnnnnnnnnnnnnnnnnnnnnnnnnnnnnnnnnnnnnnnnnnnnnnnnnnnnnnnnnnnnnnnnnnnnnnnnnnnnnnnnnnnnnnnnnnnnnnnnnnnnnnnnnnnnnnnnnnnnnnnnnnnnnnnnnnnnnnnnnnnnnnnnnnnnnnnnnnnnnnnnnnnnnnnnnnnnnnnnnnnnnnnnnnnnnnnnnnnnnnnnnnnnnnnnnnnnnnnnnnnnnnnnnnnnnnnnnnnnnnnnnnnnnnnnnnnnnnnnnnnnnnnnnnnnnnnnnnnnnnnnnnnnnnnnnnnnnnnnnnnnnnnnnnnnnnnnnnnnnnnnnnnnnnnnnnnnnnnnnnnnnnnnnnnnnnnnnnnnnnnnnnnnnnnnnnnnnnnnnnnnnnnnnnnnnnnnnnnnnnnnnnnnnnnnnnnnnnnnnnnnnnnnnnnnnnnnnnnnnnnnnnnnnnnnnnnnnnnnnnnnnnnnnnnnnnnnnnnnnnnnnnnnnnnnnnnnnnnnnnnnnnnnnnnnnnnnnnnnnnnnnnnnnnnnnnnnnnnnnnnnnnnnnnnnnnnnnnnnnnnnnnnnnnnnnnnnnnnnnnnnnnnnnnnnnnnnnnnnnnnnnnnnnnnnnnnnnnnnnnnnnnnnnnnnnnnnnnnnnnnnnnnnnnnnnnnnnnnnnnnnnnnnnnnnnnnnnnnnnnnnnnnnnnnnnnnnnnnnnnnnnnnnnnnnnnnnnnnnnnnnnnnnnnnnnnnnnnnnnnnnnnnnnnnnnnnnnnnnnnnnnnnnnnnnnnnnnnnnnnnnnnnnnnnnnnnnnnnnnnnnnnnnnnnnnnnnnnnnnnnnnnnnnnnnnnnnnnnnnnnnnnnnnnnnnnnnnnnnnnnnnnnnnnnnnnnnnnnnnnnnnnnnnnnnnnnnnnnnnnnnnnnnnnnnnnnnnnnnnnnnnnnnnnnnnnnnnnnnnnnnnnnnnnnnnnnnnnnnnnnnnnnnnnnnnnnnnnnnnnnnnnnnnnnnnnnnnnnnnnnnnnnnnnnnnnnnnnnnnnnnnnnnnnnnnnnnnnnnnnnnnnnnnnnnnnnnnnnnnnnnnnnnnnnnnnnnnnnnnnnnnnnnnnnnnnnnnnnnnnnnnnnnnnnnnnnnnnnnnnnnnnnnnnnnnnnnnnnnnnnnnnnnnnnnnnnnnnnnnnnnnnnnnnnnnnnnnnnnnnnnnnnnnnnnnnnnnnnnnnnnnnnnnnnnnnnnnnnnnnnnnnnnnnnnnnnnnnnnnnnnnnnnnnnnnnnnnnnnnnnnnnnnnnnnnnnnnnnnnnnnnnnnnnnnnnnnnnnnnnnnnnnnnnnnnnnnnnnnnnnnnnnnnnnnnnnnnnnnnnnnnnnnnnnnnnnnnnnnnnnnnnnnnnnnnnnnnnnnnnnnnnnnnnnnnnnnnnnnnnnnnnnnnnnnnnnnnnnnnnnnnnnnnnnnnnnnnnnnnnnnnnnnnnnnnnnnnnnnnnnnnnnnnnnnnnnnnnnnnnnnnnnnnnnnnnnnnnnnnnnnnnnnnnnnnnnnnnnnnnnnnnnnnnnnnnnnnnnnnnnnnnnnnnnnnnnnnnnnnnnnnnnnnnnnnnnnnnnnnnnnnnnnnnnnnnnnnnnnnnnnnnnnnnnnnnnnnnnnnnnnnnnnnnnnnnnnnnnnnnnnnnnnnnnnnnnnnnnnnnnnnnnnnnnnnnnnnnnnnnnnnnnnnnnnnnnnnnnnnnnnnnnnnnnnnnnnnnnnnnnnnnnnnnnnnnnnnnnnnnnnnnnnnnnnnnnnnnnnnnnnnnnnnnnnnnnnnnnnnnnnnnnnnnnnnnnnnnnnnnnnnnnnnnnnnnnnnnnnnnnnnnnnnnnnnnnnnnnnnnnnnnnnnnnnnnnnnnnnnnnnnnnnnnnnnnnnnnnnnnnnnnnnnnnnnnnnnnnnnnnnnnnnnnnnnnnnnnnnnnnnnnnnnnnnnnnnnnnnnnnnnnnnnnnnnnnnnnnnnnnnnnnnnnnnnnnnnnnnnnnnnnnnnnnnnnnnnnnnnnnnnnnnnnnnnnnnnnnnnnnnnnnnnnnnnnnnnnnnnnnnnnnnnnnnnnnnnnnnnnnnnnnnnnnnnnnnnnnnnnnnnnnnnnnnnnnnnnnnnnnnnnnnnnnnnnnnnnnnnnnnnnnnnnnnnnnnnnnnnnnnnnnnnnnnnnnnnnnnnnnnnnnnnnnnnnnnnnnnnnnnnnnnnnnnnnnnnnnnnnnnnnnnnnnnnnnnnnnnnnnnnnnnnnnnnnnnnnnnnnnnnnnnnnnnnnnnnnnnnnnnnnnnnnnnnnnnnnnnnnnnnnnnnnnnnnnnnnnnnnnnnnnnnnnnnnnnnnnnnnnnnnnnnnnnnnnnnnnnnnnnnnnnnnnnnnnnnnnnnnnnnnnnnnnnnnnnnnnnnnnnnnnnnnnnnnnnnnnnnnnnnnnnnnnnnnnnnnnnnnnnnnnnnnnnnnnnnnnnnnnnnnnnnnnnnnnnnnnnnnnnnnnnnnnnnnnnnnnnnnnnnnnnnnnnnnnnnnnnnnnnnnnnnnnnnnnnnnnnnnnnnnnnnnnnnnnnnnnnnnnnnnnnnnnnnnnnnnnnnnnnnnnnnnnnnnnnnnnnnnnnnnnnnnnnnnnnnnnnnnnnnnnnnnnnnnnnnnnnnnnnnnnnnnnnnnnnnnnnnnnnnnnnnnnnnnnnnnnnnnnnnnnnnnnnnnnnnnnnnnnnnnnnnnnnnnnnnnnnnnnnnnnnnnnnnnnnnnnnnnnnnnnnnnnnnnnnnnnnnnnnnnnnnnnnnnnnnnnnnnnnnnnnnnnnnnnnnnnnnnnnnnnnnnnnnnnnnnnnnnnnnnnnnnnnnnnnnnnnnnnnnnnnnnnnnnnnnnnnnnnnnnnnnnnnnnnnnnnnnnnnnnnnnnnnnnnnnnnnnnnnnnnnnnnnnnnnnnnnnnnnnnnnnnnnnnnnnnnnnnnnnnnnnnnnnnnnnnnnnnnnnnnnnnnnnnnnnnnnnnnnnnnnnnnnnnnnnnnnnnnnnnnnnnnnnnnnnnnnnnnnnnnnnnnnnnnnnnnnnnnnnnnnnnnnnnnnnnnnnnnnnnnnnnnnnnnnnnnnnnnnnnnnnnnnnnnnnnnnnnnnnnnnnnnnnnnnnnnnnnnnnnnnnnnnnnnnnnnnnnnnnnnnnnnnnnnnnnnnnnnnnnnnnnnnnnnnnnnnnnnnnnnnnnnnnnnnnnnnnnnnnnnnnnnnnnnnnnnnnnnnnnnnnnnnnnnnnnnnnnnnnnnnnnnnnnnnnnnnnnnnnnnnnnnnnnnnnnnnnnnnnnnnnnnnnnnnnnnnnnnnnnnnnnnnnnnnnnnnnnnnnnnnnnnnnnnnnnnnnnnnnnnnnnnnnnnnnnnnnnnnnnnnnnnnnnnnnnnnnnnnnnnnnnnnnnnnnnnnnnnnnnnnnnnnnnnnnnnnnnnnnnnnnnnnnnnnnnnnnnnnnnnnnnnnnnnnnnnnnnnnnnnnnnnnnnnnnnnnnnnnnnnnnnnnnnnnnnnnnnnnnnnnnnnnnnnnnnnnnnnnnnnnnnnnnnnnnnnnnnnnnnnnnnnnnnnnnnnnnnnnnnnnnnnnnnnnnnnnnnnnnnnnnnnnnnnnnnnnnnnnnnnnnnnnnnnnnnnnnnnnnnnnnnnnnnnnnnnnnnnnnnnnnnnnnnnnnnnnnnnnnnnnnnnnnnnnnnnnnnnnnnnnnnnnnnnnnnnnnnnnnnnnnnnnnnnnnnnnnnnnnnnnnnnnnnnnnnnnnnnnnnnnnnnnnnnnnnnnnnnnnnnnnnnnnnnnnnnnnnnnnnnnnnnnnnnnnnnnnnnnnnnnnnnnnnnnnnnnnnnnnnnnnnnnnnnnnnnnnnnnnnnnnnnnnnnnnnnnnnnnnnnnnnnnnnnnnnnnnnnnnnnnnnnnnnnnnnnnnnnnnnnnnnnnnnnnnnnnnnnnnnnnnnnnnnnnnnnnnnnnnnnnnnnnnnnnnnnnnnnnnnnnnnnnnnnnnnnnnnnnnnnnnnnnnnnnnnnnnnnnnnnnnnnnnnnnnnnnnnnnnnnnnnnnnnnnnnnnnnnnnnnnnnnnnnnnnnnnnnnnnnnnnnnnnnnnnnnnnnnnnnnnnnnnnnnnnnnnnnnnnnnnnnnnnnnnnnnnnnnnnnnnnnnnnnnnnnnnnnnnnnnnnnnnnnnnnnnnnnnnnnnnnnnnnnnnnnnnnnnnnnnnnnnnnnnnnnnnnnnnnnnnnnnnnnnnnnnnnnnnnnnnnnnnnnnnnnnnnnnnnnnnnnnnnnnnnnnnnnnnnnnnnnnnnnnnnnnnnnnnnnnnnnnnnnnnnnnnnnnnnnnnnnnnnnnnnnnnnnnnnnnnnnnnnnnnnnnnnnnnnnnnnnnnnnnnnnnnnnnnnnnnnnnnnnnnnnnnnnnnnnnnnnnnnnnnnnnnnnnnnnnnnnnnnnnnnnnnnnnnnnnnnnnnnnnnnnnnnnnnnnnnnnnnnnnnnnnnnnnnnnnnnnnnnnnnnnnnnnnnnnnnnnnnnnnnnnnnnnnnnnnnnnnnnnnnnnnnnnnnnnnnnnnnnnnnnnnnnnnnnnnnnnnnnnnnnnnnnnnnnnnnnnnnnnnnnnnnnnnnnnnnnnnnnnnnnnnnnnnnnnnnnnnnnnnnnnnnnnnnnnnnnnnnnnnnnnnnnnnnnnnnnnnnnnnnnnnnnnnnnnnnnnnnnnnnnnnnnnnnnnnnnnnnnnnnnnnnnnnnnnnnnnnnnnnnnnnnnnnnnnnnnnnnnnnnnnnnnnnnnnnnnnnnnnnnnnnnnnnnnnnnnnnnnnnnnnnnnnnnnnnnnnnnnnnnnnnnnnnnnnnnnnnnnnnnnnnnnnnnnnnnnnnnnnnnnnnnnnnnnnnnnnnnnnnnnnnnnnnnnnnnnnnnnnnnnnnnnnnnnnnnnnnnnnnnnnnnnnnnnnnnnnnnnnnnnnnnnnnnnnnnnnnnnnnnnnnnnnnnnnnnnnnnnnnnnnnnnnnnnnnnnnnnnnnnnnnnnnnnnnnnnnnnnnnnnnnnnnnnnnnnnnnnnnnnnnnnnnnnnnnnnnnnnnnnnnnnnnnnnnnnnnnnnnnnnnnnnnnnnnnnnnnnnnnnnnnnnnnnnnnnnnnnnnnnnnnnnnnnnnnnnnnnnnnnnnnnnnnnnnnnnnnnnnnnnnnnnnnnnnnnnnnnnnnnnnnnnnnnnnnnnnnnnnnnnnnnnnnnnnnnnnnnnnnnnnnnnnnnnnnnnnnnnnnnnnnnnnnnnnnnnnnnnnnnnnnnnnnnnnnnnnnnnnnnnnnnnnnnnnnnnnnnnnnnnnnnnnnnnnnnnnnnnnnnnnnnnnnnnnnnnnnnnnnnnnnnnnnnnnnnnnnnnnnnnnnnnnnnnnnnnnnnnnnnnnnnnnnnnnnnnnnnnnnnnnnnnnnnnnnnnnnnnnnnnnnnnnnnnnnnnnnnnnnnnnnnnnnnnnnnnnnnnnnnnnnnnnnnnnnnnnnnnnnnnnnnnnnnnnnnnnnnnnnnnnnnnnnnnnnnnnnnnnnnnnnnnnnnnnnnnnnnnnnnnnnnnnnnnnnnnnnnnnnnnnnnnnnnnnnnnnnnnnnnnnnnnnnnnnnnnnnnnnnnnnnnnnnnnnnnnnnnnnnnnnnnnnnnnnnnnnnnnnnnnnnnnnnnnnnnnnnnnnnnnnnnnnnnnnnnnnnnnnnnnnnnnnnnnnnnnnnnnnnnnnnnnnnnnnnnnnnnnnnnnnnnnnnnnnnnnnnnnnnnnnnnnnnnnnnnnnnnnnnnnnnnnnnnnnnnnnnnnnnnnnnnnnnnnnnnnnnnnnnnnnnnnnnnnnnnnnnnnnnnnnnnnnnnnnnnnnnnnnnnnnnnnnnnnnnnnnnnnnnnnnnnnnnnnnnnnnnnnnnnnnnnnnnnnnnnnnnnnnnnnnnnnnnnnnnnnnnnnnnnnnnnnnnnnnnnnnnnnnnnnnnnnnnnnnnnnnnnnnnnnnnnnnnnnnnnnnnnnnnnnnnnnnnnnnnnnnnnnnnnnnnnnnnnnnnnnnnnnnnnnnnnnnnnnnnnnnnnnnnnnnnnnnnnnnnnnnnnnnnnnnnnnnnnnnnnnnnnnnnnnnnnnnnnnnnnnnnnnnnnnnnnnnnnnnnnnnnnnnnnnnnnnnnnnnnnnnnnnnnnnnnnnnnnnnnnnnnnnnnnnnnnnnnnnnnnnnnnnnnnnnnnnnnnnnnnnnnnnnnnnnnnnnnnnnnnnnnnnnnnnnnnnnnnnnnnnnnnnnnnnnnnnnnnnnnnnnnnnnnnnnnnnnnnnnnnnnnnnnnnnnnnnnnnnnnnnnnnnnnnnnnnnnnnnnnnnnnnnnnnnnnnnnnnnnnnnnnnnnnnnnnnnnnnnnnnnnnnnnnnnnnnnnnnnnnnnnnnnnnnnnnnnnnnnnnnnnnnnnnnnnnnnnnnnnnnnnnnnnnnnnnnnnnnnnnnnnnnnnnnnnnnnnnnnnnnnnnnnnnnnnnnnnnnnnnnnnnnnnnnnnnnnnnnnnnnnnnnnnnnnnnnnnnnnnnnnnnnnnnnnnnnnnnnnnnnnnnnnnnnnnnnnnnnnnnnnnnnnnnnnnnnnnnnnnnnnnnnnnnnnnnnnnnnnnnnnnnnnnnnnnnnnnnnnnnnnnnnnnnnnnnnnnnnnnnnnnnnnnnnnnnnnnnnnnnnnnnnnnnnnnnnnnnnnnnnnnnnnnnnnnnnnnnnnnnnnnnnnnnnnnnnnnnnnnnnnnnnnnnnnnnnnnnnnnnnnnnnnnnnnnnnnnnnnnnnnnnnnnnnnnnnnnnnnnnnnnnnnnnnnnnnnnnnnnnnnnnnnnnnnnnnnnnnnnnnnnnnnnnnnnnnnnnnnnnnnnnnnnnnnnnnnnnnnnnnnnnnnnnnnnnnnnnnnnnnnnnnnnnnnnnnnnnnnnnnnnnnnnnnnnnnnnnnnnnnnnnnnnnnnnnnnnnnnnnnnnnnnnnnnnnnnnnnnnnnnnnnnnnnnnnnnnnnnnnnnnnnnnnnnnnnnnnnnnnnnnnnnnnnnnnnnnnnnnnnnnnnnnnnnnnnnnnnnnnnnnnnnnnnnnnnnnnnnnnnnnnnnnnnnnnnnnnnnnnnnnnnnnnnnnnnnnnnnnnnnnnnnnnnnnnnnnnnnnnnnnnnnnnnnnnnnnnnnnnnnnnnnnnnnnnnnnnnnnnnnnnnnnnnnnnnnnnnnnnnnnnnnnnnnnnnnnnnnnnnnnnnnnnnnnnnnnnnnnnnnnnnnnnnnnnnnnnnnnnnnnnnnnnnnnnnnnnnnnnnnnnnnnnnnnnnnnnnnnnnnnnnnnnnnnnnnnnnnnnnnnnnnnnnnnnnnnnnnnnnnnnnnnnnnnnnnnnnnnnnnnnnnnnnnnnnnnnnnnnnnnnnnnnnnnnnnnnnnnnnnnnnnnnnnnnnnnnnnnnnnnnnnnnnnnnnnnnnnnnnnnnnnnnnnnnnnnnnnnnnnnnnnnnnnnnnnnnnnnnnnnnnnnnnnnnnnnnnnnnnnnnnnnnnnnnnnnnnnnnnnnnnnnnnnnnnnnnnnnnnnnnnnnnnnnnnnnnnnnnnnnnnnnnnnnnnnnnnnnnnnnnnnnnnnnnnnnnnnnnnnnnnnnnnnnnnnnnnnnnnnnnnnnnnnnnnnnnnnnnnnnnnnnnnnnnnnnnnnnnnnnnnnnnnnnnnnnnnnnnnnnnnnnnnnnnnnnnnnnnnnnnnnnnnnnnnnnnnnnnnnnnnnnnnnnnnnnnnnnnnnnnnnnnnnnnnnnnnnnnnnnnnnnnnnnnnnnnnnnnnnnnnnnnnnnnnnnnnnnnnnnnnnnnnnnnnnnnnnnnnnnnnnnnnnnnnnnnnnnnnnnnnnnnnnnnnnnnnnnnnnnnnnnnnnnnnnnnnnnnnnnnnnnnnnnnnnnnnnnnnnnnnnnnnnnnnnnnnnnnnnnnnnnnnnnnnnnnnnnnnnnnnnnnnnnnnnnnnnnnnnnnnnnnnnnnnnnnnnnnnnnnnnnnnnnnnnnnnnnnnnnnnnnnnnnnnnnnnnnnnnnnnnnnnnnnnnnnnnnnnnnnnnnnnnnnnnnnnnnnnnnnnnnnnnnnnnnnnnnnnnnnnnnnnnnnnnnnnnnnnnnnnnnnnnnnnnnnnnnnnnnnnnnnnnnnnnnnnnnnnnnnnnnnnnnnnnnnnnnnnnnnnnnnnnnnnnnnnnnnnnnnnnnnnnnnnnnnnnnnnnnnnnnnnnnnnnnnnnnnnnnnnnnnnnnnnnnnnnnnnnnnnnnnnnnnnnnnnnnnnnnnnnnnnnnnnnnnnnnnnnnnnnnnnnnnnnnnnnnnnnnnnnnnnnnnnnnnnnnnnnnnnnnnnnnnnnnnnnnnnnnnnnnnnnnnnnnnnnnnnnnnnnnnnnnnnnnnnnnnnnnnnnnnnnnnnnnnnnnnnnnnnnnnnnnnnnnnnnnnnnnnnnnnnnnnnnnnnnnnnnnnnnnnnnnnnnnnnnnnnnnnnnnnnnnnnnnnnnnnnnnnnnnnnnnnnnnnnnnnnnnnnnnnnnnnnnnnnnnnnnnnnnnnnnnnnnnnnnnnnnnnnnnnnnnnnnnnnnnnnnnnnnnnnnnnnnnnnnnnnnnnnnnnnnnnnnnnnnnnnnnnnnnnnnnnnnnnnnnnnnnnnnnnnnnnnnnnnnnnnnnnnnnnnnnnnnnnnnnnnnnnnnnnnnnnnnnnnnnnnnnnnnnnnnnnnnnnnnnnnnnnnnnnnnnnnnnnnnnnnnnnnnnnnnnnnnnnnnnnnnnnnnnnnnnnnnnnnnnnnnnnnnnnnnnnnnnnnnnnnnnnnnnnnnnnnnnnnnnnnnnnnnnnnnnnnnnnnnnnnnnnnnnnnnnnnnnnnnnnnnnnnnnnnnnnnnnnnnnnnnnnnnnnnnnnnnnnnnnnnnnnnnnnnnnnnnnnnnnnnnnnnnnnnnnnnnnnnnnnnnnnnnnnnnnnnnnnnnnnnnnnnnnnnnnnnnnnnnnnnnnnnnnnnnnnnnnnnnnnnnnnnnnnnnnnnnnnnnnnnnnnnnnnnnnnnnnnnnnnnnnnnnnnnnnnnnnnnnnnnnnnnnnnnnnnnnnnnnnnnnnnnnnnnnnnnnnnnnnnnnnnnnnnnnnnnnnnnnnnnnnnnnnnnnnnnnnnnnnnnnnnnnnnnnnnnnnnnnnnnnnnnnnnnnnnnnnnnnnnnnnnnnnnnnnnnnnnnnnnnnnnnnnnnnnnnnnnnnnnnnnnnnnnnnnnnnnnnnnnnnnnnnnnnnnnnnnnnnnnnnnnnnnnnnnnnnnnnnnnnnnnnnnnnnnnnnnnnnnnnnnnnnnnnnnnnnnnnnnnnnnnnnnnnnnnnnnnnnnnnnnnnnnnnnnnnnnnnnnnnnnnnnnnnnnnnnnnnnnnnnnnnnnnnnnnnnnnnnnnnnnnnnnnnnnnnnnnnnnnnnnnnnnnnnnnnnnnnnnnnnnnnnnnnnnnnnnnnnnnnnnnnnnnnnnnnnnnnnnnnnnnnnnnnnnnnnnnnnnnnnnnnnnnnnnnnnnnnnnnnnnnnnnnnnnnnnnnnnnnnnnnnnnnnnnnnnnnnnnnnnnnnnnnnnnnnnnnnnnnnnnnnnnnnnnnnnnnnnnnnnnnnnnnnnnnnnnnnnnnnnnnnnnnnnnnnnnnnnnnnnnnnnnnnnnnnnnnnnnnnnnnnnnnnnnnnnnnnnnnnnnnnnnnnnnnnnnnnnnnnnnnnnnnnnnnnnnnnnnnnnnnnnnnnnnnnnnnnnnnnnnnnnnnnnnnnnnnnnnnnnnnnnnnnnnnnnnnnnnnnnnnnnnnnnnnnnnnnnnnnnnnnnnnnnnnnnnnnnnnnnnnnnnnnnnnnnnnnnnnnnnnnnnnnnnnnnnnnnnnnnnnnnnnnnnnnnnnnnnnnnnnnnnnnnnnnnnnnnnnnnnnnnnnnnnnnnnnnnnnnnnnnnnnnnnnnnnnnnnnnnnnnnnnnnnnnnnnnnnnnnnnnnnnnnnnnnnnnnnnnnnnnnnnnnnnnnnnnnnnnnnnnnnnnnnnnnnnnnnnnnnnnnnnnnnnnnnnnnnnnnnnnnnnnnnnnnnnnnnnnnnnnnnnnnnnnnnnnnnnnnnnnnnnnnnnnnnnnnnnnnnnnnnnnnnnnnnnnnnnnnnnnnnnnnnnnnnnnnnnnnnnnnnnnnnnnnnnnnnnnnnnnnnnnnnnnnnnnnnnnnnnnnnnnnnnnnnnnnnnnnnnnnnnnnnnnnnnnnnnnnnnnnnnnnnnnnnnnnnnnnnnnnnnnnnnnnnnnnnnnnnnnnnnnnnnnnnnnnnnnnnnnnnnnnnnnnnnnnnnnnnnnnnnnnnnnnnnnnnnnnnnnnnnnnnnnnnnnnnnnnnnnnnnnnnnnnnnnnnnnnnnnnnnnnnnnnnnnnnnnnnnnnnnnnnnnnnnnnnnnnnnnnnnnnnnnnnnnnnnnnnnnnnnnnnnnnnnnnnnnnnnnnnnnnnnnnnnnnnnnnnnnnnnnnnnnnnnnnnnnnnnnnnnnnnnnnnnnnnnnnnnnnnnnnnnnnnnnnnnnnnnnnnnnnnnnnnnnnnnnnnnnnnnnnnnnnnnnnnnnnnnnnnnnnnnnnnnnnnnnnnnnnnnnnnnnnnnnnnnnnnnnnnnnnnnnnnnnnnnnnnnnnnnnnnnnnnnnnnnnnnnnnnnnnnnnnnnnnnnnnnnnnnnnnnnnnnnnnnnnnnnnnnnnnnnnnnnnnnnnnnnnnnnnnnnnnnnnnnnnnnnnnnnnnnnnnnnnnnnnnnnnnnnnnnnnnnnnnnnnnnnnnnnnnnnnnnnnnnnnnnnnnnnnnnnnnnnnnnnnnnnnnnnnnnnnnnnnnnnnnnnnnnnnnnnnnnnnnnnnnnnnnnnnnnnnnnnnnnnnnnnnnnnnnnnnnnnnnnnnnnnnnnnnnnnnnnnnnnnnnnnnnnnnnnnnnnnnnnnnnnnnnnnnnnnnnnnnnnnnnnnnnnnnnnnnnnnnnnnnnnnnnnnnnnnnnnnnnnnnnnnnnnnnnnnnnnnnnnnnnnnnnnnnnnnnnnnnnnnnnnnnnnnnnnnnnnnnnnnnnnnnnnnnnnnnnnnnnnnnnnnnnnnnnnnnnnnnnnnnnnnnnnnnnnnnnnnnnnnnnnnnnnnnnnnnnnnnnnnnnnnnnnnnnnnnnnnnnnnnnnnnnnnnnnnnnnnnnnnnnnnnnnnnnnnnnnnnnnnnnnnnnnnnnnnnnnnnnnnnnnnnnnnnnnnnnnnnnnnnnnnnnnnnnnnnnnnnnnnnnnnnnnnnnnnnnnnnnnnnnnnnnnnnnnnnnnnnnnnnnnnnnnnnnnnnnnnnnnnnnnnnnnnnnnnnnnnnnnnnnnnnnnnnnnnnnnnnnnnnnnnnnnnnnnnnnnnnnnnnnnnnnnnnnnnnnnnnnnnnnnnnnnnnnnnnnnnnnnnnnnnnnnnnnnnnnnnnnnnnnnnnnnnnnnnnnnnnnnnnnnnnnnnnnnnnnnnnnnnnnnnnnnnnnnnnnnnnnnnnnnnnnnnnnnnnnnnnnnnnnnnnnnnnnnnnnnnnnnnnnnnnnnnnnnnnnnnnnnnnnnnnnnnnnnnnnnnnnnnnnnnnnnnnnnnnnnnnnnnnnnnnnnnnnnnnnnnnnnnnnnnnnnnnnnnnnnnnnnnnnnnnnnnnnnnnnnnnnnnnnnnnnnnnnnnnnnnnnnnnnnnnnnnnnnnnnnnnnnnnnnnnnnnnnnnnnnnnnnnnnnnnnnnnnnnnnnnnnnnnnnnnnnnnnnnnnnnnnnnnnnnnnnnnnnnnnnnnnnnnnnnnnnnnnnnnnnnnnnnnnnnnnnnnnnnnnnnnnnnnnnnnnnnnnnnnnnnnnnnnnnnnnnnnnnnnnnnnnnnnnnnnnnnnnnnnnnnnnnnnnnnnnnnnnnnnnnnnnnnnnnnnnnnnnnnnnnnnnnnnnnnnnnnnnnnnnnnnnnnnnnnnnnnnnnnnnnnnnnnnnnnnnnnnnnnnnnnnnnnnnnnnnnnnnnnnnnnnnnnnnnnnnnnnnnnnnnnnnnnnnnnnnnnnnnnnnnnnnnnnnnnnnnnnnnnnnnnnnnnnnnnnnnnnnnnnnnnnnnnnnnnnnnnnnnnnnnnnnnnnnnnnnnnnnnnnnnnnnnnnnnnnnnnnnnnnnnnnnnnnnnnnnnnnnnnnnnnnnnnnnnnnnnnnnnnnnnnnnnnnnnnnnnnnnnnnnnnnnnnnnnnnnnnnnnnnnnnnnnnnnnnnnnnnnnnnnnnnnnnnnnnnnnnnnnnnnnnnnnnnnnnnnnnnnnnnnnnnnnnnnnnnnnnnnnnnnnnnnnnnnnnnnnnnnnnnnnnnnnnnnnnnnnnnnnnnnnnnnnnnnnnnnnnnnnnnnnnnnnnnnnnnnnnnnnnnnnnnnnnnnnnnnnnnnnnnnnnnnnnnnnnnnnnnnnnnnnnnnnnnnnnnnnnnnnnnnnnnnnnnnnnnnnnnnnnnnnnnnnnnnnnnnnnnnnnnnnnnnnnnnnnnnnnnnnnnnnnnnnnnnnnnnnnnnnnnnnnnnnnnnnnnnnnnnnnnnnnnnnnnnnnnnnnnnnnnnnnnnnnnnnnnnnnnnnnnnnnnnnnnnnnnnnnnnnnnnnnnnnnnnnnnnnnnnnnnnnnnnnnnnnnnnnnnnnnnnnnnnnnnnnnnnnnnnnnnnnnnnnnnnnnnnnnnnnnnnnnnnnnnnnnnnnnnnnnnnnnnnnnnnnnnnnnnnnnnnnnnnnnnnnnnnnnnnnnnnnnnnnnnnnnnnnnnnnnnnnnnnnnnnnnnnnnnnnnnnnnnnnnnnnnnnnnnnnnnnnnnnnnnnnnnnnnnnnnnnnnnnnnnnnnnnnnnnnnnnnnnnnnnnnnnnnnnnnnnnnnnnnnnnnnnnnnnnnnnnnnnnnnnnnnnnnnnnnnnnnnnnnnnnnnnnnnnnnnnnnnnnnnnnnnnnnnnnnnnnnnnnnnnnnnnnnnnnnnnnnnnnnnnnnnnnnnnnnnnnnnnnnnnnnnnnnnnnnnnnnnnnnnnnnnnnnnnnnnnnnnnnnnnnnnnnnnnnnnnnnnnnnnnnnnnnnnnnnnnnnnnnnnnnnnnnnnnnnnnnnnnnnnnnnnnnnnnnnnnnnnnnnnnnnnnnnnnnnnnnnnnnnnnnnnnnnnnnnnnnnnnnnnnnnnnnnnnnnnnnnnnnnnnnnnnnnnnnnnnnnnnnnnnnnnnnnnnnnnnnnnnnnnnnnnnnnnnnnnnnnnnnnnnnnnnnnnnnnnnnnnnnnnnnnnnnnnnnnnnnnnnnnnnnnnnnnnnnnnnnnnnnnnnnnnnnnnnnnnnnnnnnnnnnnnnnnnnnnnnnnnnnnnnnnnnnnnnnnnnnnnnnnnnnnnnnnnnnnnnnnnnnnnnnnnnnnnnnnnnnnnnnnnnnnnnnnnnnnnnnnnnnnnnnnnnnnnnnnnnnnnnnnnnnnnnnnnnnnnnnnnnnnnnnnnnnnnnnnnnnnnnnnnnnnnnnnnnnnnnnnnnnnnnnnnnnnnnnnnnnnnnnnnnnnnnnnnnnnnnnnnnnnnnnnnnnnnnnnnnnnnnnnnnnnnnnnnnnnnnnnnnnnnnnnnnnnnnnnnnnnnnnnnnnnnnnnnnnnnnnnnnnnnnnnnnnnnnnnnnnnnnnnnnnnnnnnnnnnnnnnnnnnnnnnnnnnnnnnnnnnnnnnnnnnnnnnnnnnnnnnnnnnnnnnnnnnnnnnnnnnnnnnnnnnnnnnnnnnnnnnnnnnnnnnnnnnnnnnnnnnnnnnnnnnnnnnnnnnnnnnnnnnnnnnnnnnnnnnnnnnnnnnnnnnnnnnnnnnnnnnnnnnnnnnnnnnnnnnnnnnnnnnnnnnnnnnnnnnnnnnnnnnnnnnnnnnnnnnnnnnnnnnnnnnnnnnnnnnnnnnnnnnnnnnnnnnnnnnnnnnnnnnnnnnnnnnnnnnnnnnnnnnnnnnnnnnnnnnnnnnnnnnnnnnnnnnnnnnnnnnnnnnnnnnnnnnnnnnnnnnnnnnnnnnnnnnnnnnnnnnnnnnnnnnnnnnnnnnnnnnnnnnnnnnnnnnnnnnnnnnnnnnnnnnnnnnnnnnnnnnnnnnnnnnnnnnnnnnnnnnnnnnnnnnnnnnnnnnnnnnnnnnnnnnnnnnnnnnnnnnnnnnnnnnnnnnnnnnnnnnnnnnnnnnnnnnnnnnnnnnnnnnnnnnnnnnnnnnnnnnnnnnnnnnnnnnnnnnnnnnnnnnnnnnnnnnnnnnnnnnnnnnnnnnnnnnnnnnnnnnnnnnnnnnnnnnnnnnnnnnnnnnnnnnnnnnnnnnnnnnnnnnnnnnnnnnnnnnnnnnnnnnnnnnnnnnnnnnnnnnnnnnnnnnnnnnnnnnnnnnnnnnnnnnnnnnnnnnnnnnnnnnnnnnnnnnnnnnnnnnnnnnnnnnnnnnnnnnnnnnnnnnnnnnnnnnnnnnnnnnnnnnnnnnnnnnnnnnnnnnnnnnnnnnnnnnnnnnnnnnnnnnnnnnnnnnnnnnnnnnnnnnnnnnnnnnnnnnnnnnnnnnnnnnnnnnnnnnnnnnnnnnnnnnnnnnnnnnnnnnnnnnnnnnnnnnnnnnnnnnnnnnnnnnnnnnnnnnnnnnnnnnnnnnnnnnnnnnnnnnnnnnnnnnnnnnnnnnnnnnnnnnnnnnnnnnnnnnnnnnnnnnnnnnnnnnnnnnnnnnnnnnnnnnnnnnnnnnnnnnnnnnnnnnnnnnnnnnnnnnnnnnnnnnnnnnnnnnnnnnnnnnnnnnnnnnnnnnnnnnnnnnnnnnnnnnnnnnnnnnnnnnnnnnnnnnnnnnnnnnnnnnnnnnnnnnnnnnnnnnnnnnnnnnnnnnnnnnnnnnnnnnnnnnnnnnnnnnnnnnnnnnnnnnnnnnnnnnnnnnnnnnnnnnnnnnnnnnnnnnnnnnnnnnnnnnnnnnnnnnnnnnnnnnnnnnnnnnnnnnnnnnnnnnnnnnnnnnnnnnnnnnnnnnnnnnnnnnnnnnnnnnnnnnnnnnnnnnnnnnnnnnnnnnnnnnnnnnnnnnnnnnnnnnnnnnnnnnnnnnnnnnnnnnnnnnnnnnnnnnnnnnnnnnnnnnnnnnnnnnnnnnnnnnnnnnnnnnnnnnnnnnnnnnnnnnnnnnnnnnnnnnnnnnnnnnnnnnnnnnnnnnnnnnnnnnnnnnnnnnnnnnnnnnnnnnnnnnnnnnnnnnnnnnnnnnnnnnnnnnnnnnnnnnnnnnnnnnnnnnnnnnnnnnnnnnnnnnnnnnnnnnnnnnnnnnnnnnnnnnnnnnnnnnnnnnnnnnnnnnnnnnnnnnnnnnnnnnnnnnnnnnnnnnnnnnnnnnnnnnnnnnnnnnnnnnnnnnnnnnnnnnnnnnnnnnnnnnnnnnnnnnnnnnnnnnnnnnnnnnnnnnnnnnnnnnnnnnnnnnnnnnnnnnnnnnnnnnnnnnnnnnnnnnnnnnnnnnnnnnnnnnnnnnnnnnnnnnnnnnnnnnnnnnnnnnnnnnnnnnnnnnnnnnnnnnnnnnnnnnnnnnnnnnnnnnnnnnnnnnnnnnnnnnnnnnnnnnnnnnnnnnnnnnnnnnnnnnnnnnnnnnnnnnnnnnnnnnnnnnnnnnnnnnnnnnnnnnnnnnnnnnnnnnnnnnnnnnnnnnnnnnnnnnnnnnnnnnnnnnnnnnnnnnnnnnnnnnnnnnnnnnnnnnnnnnnnnnnnnnnnnnnnnnnnnnnnnnnnnnnnnnnnnnnnnnnnnnnnnnnnnnnnnnnnnnnnnnnnnnnnnnnnnnnnnnnnnnnnnnnnnnnnnnnnnnnnnnnnnnnnnnnnnnnnnnnnnnnnnnnnnnnnnnnnnnnnnnnnnnnnnnnnnnnnnnnnnnnnnnnnnnnnnnnnnnnnnnnnnnnnnnnnnnnnnnnnnnnnnnnnnnnnnnnnnnnnnnnnnnnnnnnnnnnnnnnnnnnnnnnnnnnnnnnnnnnnnnnnnnnnnnnnnnnnnnnnnnnnnnnnnnnnnnnnnnnnnnnnnnnnnnnnnnnnnnnnnnnnnnnnnnnnnnnnnnnnnnnnnnnnnnnnnnnnnnnnnnnnnnnnnnnnnnnnnnnnnnnnnnnnnnnnnnnnnnnnnnnnnnnnnnnnnnnnnnnnnnnnnnnnnnnnnnnnnnnnnnnnnnnnnnnnnnnnnnnnnnnnnnnnnnnnnnnnnnnnnnnnnnnnnnnnnnnnnnnnnnnnnnnnnnnnnnnnnnnnnnnnnnnnnnnnnnnnnnnnnnnnnnnnnnnnnnnnnnnnnnnnnnnnnnnnnnnnnnnnnnnnnnnnnnnnnnnnnnnnnnnnnnnnnnnnnnnnnnnnnnnnnnnnnnnnnnnnnnnnnnnnnnnnnnnnnnnnnnnnnnnnnnnnnnnnnnnnnnnnnnnnnnnnnnnnnnnnnnnnnnnnnnnnnnnnnnnnnnnnnnnnnnnnnnnnnnnnnnnnnnnnnnnnnnnnnnnnnnnnnnnnnnnnnnnnnnnnnnnnnnnnnnnnnnnnnnnnnnnnnnnnnnnnnnnnnnnnnnnnnnnnnnnnnnnnnnnnnnnnnnnnnnnnnnnnnnnnnnnnnnnnnnnnnnnnnnnnnnnnnnnnnnnnnnnnnnnnnnnnnnnnnnnnnnnnnnnnnnnnnnnnnnnnnnnnnnnnnnnnnnnnnnnnnnnnnnnnnnnnnnnnnnnnnnnnnnnnnnnnnnnnnnnnnnnnnnnnnnnnnnnnnnnnnnnnnnnnnnnnnnnnnnnnnnnnnnnnnnnnnnnnnnnnnnnnnnnnnnnnnnnnnnnnnnnnnnnnnnnnnnnnnnnnnnnnnnnnnnnnnnnnnnnnnnnnnnnnnnnnnnnnnnnnnnnnnnnnnnnnnnnnnnnnnnnnnnnnnnnnnnnnnnnnnnnnnnnnnnnnnnnnnnnnnnnnnnnnnnnnnnnnnnnnnnnnnnnnnnnnnnnnnnnnnnnnnnnnnnnnnnnnnnnnnnnnnnnnnnnnnnnnnnnnnnnnnnnnnnnnnnnnnnnnnnnnnnnnnnnnnnnnnnnnnnnnnnnnnnnnnnnnnnnnnnnnnnnnnnnnnnnnnnnnnnnnnnnnnnnnnnnnnnnnnnnnnnnnnnnnnnnnnnnnnnnnnnnnnnnnnnnnnnnnnnnnnnnnnnnnnnnnnnnnnnnnnnnnnnnnnnnnnnnnnnnnnnnnnnnnnnnnnnnnnnnnnnnnnnnnnnnnnnnnnnnnnnnnnnnnnnnnnnnnnnnnnnnnnnnnnnnnnnnnnnnnnnnnnnnnnnnnnnnnnnnnnnnnnnnnnnnnnnnnnnnnnnnnnnnnnnnnnnnnnnnnnnnnnnnnnnnnnnnnnnnnnnnnnnnnnnnnnnnnnnnnnnnnnnnnnnnnnnnnnnnnnnnnnnnnnnnnnnnnnnnnnnnnnnnnnnnnnnnnnnnnnnnnnnnnnnnnnnnnnnnnnnnnnnnnnnnnnnnnnnnnnnnnnnnnnnnnnnnnnnnnnnnnnnnnnnnnnnnnnnnnnnnnnnnnnnnnnnnnnnnnnnnnnnnnnnnnnnnnnnnnnnnnnnnnnnnnnnnnnnnnnnnnnnnnnnnnnnnnnnnnnnnnnnnnnnnnnnnnnnnnnnnnnnnnnnnnnnnnnnnnnnnnnnnnnnnnnnnnnnnnnnnnnnnnnnnnnnnnnnnnnnnnnnnnnnnnnnnnnnnnnnnnnnnnnnnnnnnnnnnnnnnnnnnnnnnnnnnnnnnnnnnnnnnnnnnnnnnnnnnnnnnnnnnnnnnnnnnnnnnnnnnnnnnnnnnnnnnnnnnnnnnnnnnnnnnnnnnnnnnnnnnnnnnnnnnnnnnnnnnnnnnnnnnnnnnnnnnnnnnnnnnnnnnnnnnnnnnnnnnnnnnnnnnnnnnnnnnnnnnnnnnnnnnnnnnnnnnnnnnnnnnnnnnnnnnnnnnnnnnnnnnnnnnnnnnnnnnnnnnnnnnnnnnnnnnnnnnnnnnnnnnnnnnnnnnnnnnnnnnnnnnnnnnnnnnnnnnnnnnnnnnnnnnnnnnnnnnnnnnnnnnnnnnnnnnnnnnnnnnnnnnnnnnnnnnnnnnnnnnnnnnnnnnnnnnnnnnnnnnnnnnnnnnnnnnnnnnnnnnnnnnnnnnnnnnnnnnnnnnnnnnnnnnnnnnnnnnnnnnnnnnnnnnnnnnnnnnnnnnnnnnnnnnnnnnnnnnnnnnnnnnnnnnnnnnnnnnnnnnnnnnnnnnnnnnnnnnnnnnnnnnnnnnnnnnnnnnnnnnnnnnnnnnnnnnnnnnnnnnnnnnnnnnnnnnnnnnnnnnnnnnnnnnnnnnnnnnnnnnnnnnnnnnnnnnnnnnnnnnnnnnnnnnnnnnnnnnnnnnnnnnnnnnnnnnnnnnnnnnnnnnnnnnnnnnnnnnnnnnnnnnnnnnnnnnnnnnnnnnnnnnnnnnnnnnnnnnnnnnnnnnnnnnnnnnnnnnnnnnnnnnnnnnnnnnnnnnnnnnnnnnnnnnnnnnnnnnnnnnnnnnnnnnnnnnnnnnnnnnnnnnnnnnnnnnnnnnnnnnnnnnnnnnnnnnnnnnnnnnnnnnnnnnnnnnnnnnnnnnnnnnnnnnnnnnnnnnnnnnnnnnnnnnnnnnnnnnnnnnnnnnnnnnnnnnnnnnnnnnnnnnnnnnnnnnnnnnnnnnnnnnnnnnnnnnnnnnnnnnnnnnnnnnnnnnnnnnnnnnnnnnnnnnnnnnnnnnnnnnnnnnnnnnnnnnnnnnnnnnnnnnnnnnnnnnnnnnnnnnnnnnnnnnnnnnnnnnnnnnnnnnnnnnnnnnnnnnnnnnnnnnnnnnnnnnnnnnnnnnnnnnnnnnnnnnnnnnnnnnnnnnnnnnnnnnnnnnnnnnnnnnnnnnnnnnnnnnnnnnnnnnnnnnnnnnnnnnnnnnnnnnnnnnnnnnnnnnnnnnnnnnnnnnnnnnnnnnnnnnnnnnnnnnnnnnnnnnnnnnnnnnnnnnnnnnnnnnnnnnnnnnnnnnnnnnnnnnnnnnnnnnnnnnnnnnnnnnnnnnnnnnnnnnnnnnnnnnnnnnnnnnnnnnnnnnnnnnnnnnnnnnnnnnnnnnnnnnnnnnnnnnnnnnnnnnnnnnnnnnnnnnnnnnnnnnnnnnnnnnnnnnnnnnnnnnnnnnnnnnnnnnnnnnnnnnnnnnnnnnnnnnnnnnnnnnnnnnnnnnnnnnnnnnnnnnnnnnnnnnnnnnnnnnnnnnnnnnnnnnnnnnnnnnnnnnnnnnnnnnnnnnnnnnnnnnnnnnnnnnnnnnnnnnnnnnnnnnnnnnnnnnnnnnnnnnnnnnnnnnnnnnnnnnnnnnnnnnnnnnnnnnnnnnnnnnnnnnnnnnnnnnnnnnnnnnnnnnnnnnnnnnnnnnnnnnnnnnnnnnnnnnnnnnnnnnnnnnnnnnnnnnnnnnnnnnnnnnnnnnnnnnnnnnnnnnnnnnnnnnnnnnnnnnnnnnnnnnnnnnnnnnnnnnnnnnnnnnnnnnnnnnnnnnnnnnnnnnnnnnnnnnnnnnnnnnnnnnnnnnnnnnnnnnnnnnnnnnnnnnnnnnnnnnnnnnnnnnnnnnnnnnnnnnnnnnnnnnnnnnnnnnnnnnnnnnnnnnnnnnnnnnnnnnnnnnnnnnnnnnnnnnnnnnnnnnnnnnnnnnnnnnnnnnnnnnnnnnnnnnnnnnnnnnnnnnnnnnnnnnnnnnnnnnnnnnnnnnnnnnnnnnnnnnnnnnnnnnnnnnnnnnnnnnnnnnnnnnnnnnnnnnnnnnnnnnnnnnnnnnnnnnnnnnnnnnnnnnnnnnnnnnnnnnnnnnnnnnnnnnnnnnnnnnnnnnnnnnnnnnnnnnnnnnnnnnnnnnnnnnnnnnnnnnnnnnnnnnnnnnnnnnnnnnnnnnnnnnnnnnnnnnnnnnnnnnnnnnnnnnnnnnnnnnnnnnnnnnnnnnnnnnnnnnnnnnnnnnnnnnnnnnnnnnnnnnnnnnnnnnnnnnnnnnnnnnnnnnnnnnnnnnnnnnnnnnnnnnnnnnnnnnnnnnnnnnnnnnnnnnnnnnnnnnnnnnnnnnnnnnnnnnnnnnnnnnnnnnnnnnnnnnnnnnnnnnnnnnnnnnnnnnnnnnnnnnnnnnnnnnnnnnnnnnnnnnnnnnnnnnnnnnnnnnnnnnnnnnnnnnnnnnnnnnnnnnnnnnnnnnnnnnnnnnnnnnnnnnnnnnnnnnnnnnnnnnnnnnnnnnnnnnnnnnnnnnnnnnnnnnnnnnnnnnnnnnnnnnnnnnnnnnnnnnnnnnnnnnnnnnnnnnnnnnnnnnnnnnnnnnnnnnnnnnnnnnnnnnnnnnnnnnnnnnnnnnnnnnnnnnnnnnnnnnnnnnnnnnnnnnnnnnnnnnnnnnnnnnnnnnnnnnnnnnnnnnnnnnnnnnnnnnnnnnnnnnnnnnnnnnnnnnnnnnnnnnnnnnnnnnnnnnnnnnnnnnnnnnnnnnnnnnnnnnnnnnnnnnnnnnnnnnnnnnnnnnnnnnnnnnnnnnnnnnnnnnnnnnnnnnnnnnnnnnnnnnnnnnnnnnnnnnnnnnnnnnnnnnnnnnnnnnnnnnnnnnnnnnnnnnnnnnnnnnnnnnnnnnnnnnnnnnnnnnnnnnnnnnnnnnnnnnnnnnnnnnnnnnnnnnnnnnnnnnnnnnnnnnnnnnnnnnnnnnnnnnnnnnnnnnnnnnnnnnnnnnnnnnnnnnnnnnnnnnnnnnnnnnnnnnnnnnnnnnnnnnnnnnnnnnnnnnnnnnnnnnnnnnnnnnnnnnnnnnnnnnnnnnnnnnnnnnnnnnnnnnnnnnnnnnnnnnnnnnnnnnnnnnnnnnnnnnnnnnnnnnnnnnnnnnnnnnnnnnnnnnnnnnnnnnnnnnnnnnnnnnnnnnnnnnnnnnnnnnnnnnnnnnnnnnnnnnnnnnnnnnnnnnnnnnnnnnnnnnnnnnnnnnnnnnnnnnnnnnnnnnnnnnnnnnnnnnnnnnnnnnnnnnnnnnnnnnnnnnnnnnnnnnnnnnnnnnnnnnnnnnnnnnnnnnnnnnnnnnnnnnnnnnnnnnnnnnnnnnnnnnnnnnnnnnnnnnnnnnnnnnnnnnnnnnnnnnnnnnnnnnnnnnnnnnnnnnnnnnnnnnnnnnnnnnnnnnnnnnnnnnnnnnnnnnnnnnnnnnnnnnnnnnnnnnnnnnnnnnnnnnnnnnnnnnnnnnnnnnnnnnnnnnnnnnnnnnnnnnnnnnnnnnnnnnnnnnnnnnnnnnnnnnnnnnnnnnnnnnnnnnnnnnnnnnnnnnnnnnnnnagcagttccttgccttcacgcagagtcgcttcctgcagcgattgggagagttcgcgatggcgagggacggcgcaaattcggggacaggcaccgttctcgctccctgcagtcgctgcgcttccggagccagtccccgaagtttgcactccggtcgcatctggtttgcggtactgaatgccatcgacctcggcacggccgcagcaaagggcgaagtaatcgcatccacccaattgcgagcaggcctgcggattgcgcggccaaagggagtagcggcggcggtagaggatttcctgcgagagcgcccaggcatcctgcatgtattcgaggatctcggaatcgcgccggccgacttcgcgctgcgcgaagtagtattcggggcgggattccacatcggccaaaatcttgtggaagtattcctcaggagtcatctcgcgctggaagatgatttcgcccggttcggtcttgctctgcttccatcgcttgccgtccttggtccgcacgcgccggctgtcgttatccaggacgatcttgaggccgttctcatcaagcaccggaacccaggtggcttgcagcatggggcggcggatggcatcgcaaacaatggtgtcgggctcaatgcccttggccttgcgggaaatgaagtactgggaagtctgcgtgtccatgatccagcggtcccagtaatcgctggaagcgtcgagagaatcggtggtggttttgtgctcaaggactttgtggagtccagcctcgcccaacagcaagtcgatctttcccgccacatcgaacgagcgcgacagcccgccggtttcgggattgaccaagggaaaggaaaattcctcttcgacaccttcgatctgtgccgcgccaaagcggccggcataacattttgcgtagccgatgagaacggccaaggctttcgcgcgaacgaacggatcggcctcgagggcgagaagggcatcggcccatggcgcgttcagcgcgcgggcataggcttccttgtcttcgcctgcatcctggtgaatgtaggattcaagatcaaagccggcattggcctgttcgacgcaatcgacttgttccatggttgctgcatccacttgacaaatcctctctgccgggtttataccggcgttcgataagttggtttccgagaaatcggaagcctgggcgccttcccccgcatttggcttgcggtaaggttggcgtctcaagtcagccgtcgcgcccctaacgcggcggctttgcactatcaggcggtcaacctgagcgctcctgcttccaaaccttcctttacttcctgcgggacggcatcctgcggcggcggccaatccagcccgaggcgctcggcggcttgttccaacaaatagagcgtcttaggcgagccgatccccgcagccagaaaagcgtaaacctgggcaatggtcacgcgaccgtcgcaggccatggacagcgcccgcggcgtcacgcgctgggcatcacgcgcctgggtcagcacgcgctccagattccgcctcacccaatcctccgcctcgtattcggcccccagcgtcaacattggcatctcttcacctccttccggtgttttcttcgcctttatttcgccttctacaatatgcagatttgcatattttgtcaatgccttttctcattcattatgcagatcattgtgtgttgccttttatgccagcggagtttaggatcttgaacagcaccatggatgagacaaaacaaaccacagccagtaaactggcgtctttgcttaaattcttccgtcagcgggcgaagatgacacagccggatctcgcgcaacaggccggcatttctccttccatggtctttcgcaccgaaaaatccctgtctgttcctgccgccgatgactatgcaaatatgctcagtgcatgtggcgttgacctggtgcatatcctggagcgagttgccgcggcacaggacgcgggccggcaagtcaagcactgggaacgcgtttccaaccccctggagcaagtctttgatgaattgggcgaagcggtgcaggaggaaaaggagatcctcatcgcgatggaccgctacggcctgttcgccggcgaaaccgacccagccacagcacgaaagaaaataatcgagacatggtggggccttcgacgctcgacacaccgcgactgagcagccgctggtggagtttgagccggcaccccagcgacagccgcaggccgtttcttgttcctttgctccctcgtccaaacatccgcattcatgcaccctctataggttacttaccggatttcctgaaaaagtgacgaaacttgtccaaaaaatctgagcgcaacctagcgcaagaagcgttgtgctgaactttggcgagcgttgttttttcgttgttttttgcgtgtggtaattgaggtgctactgaaaaattcgctggccctgctatatttttgatgaaatttttaccggagattaaataaggtaatgttttctctgcttggttcgttatctcgtcatttctccgggaggaccacctcagcatgacttataatctgattgatgaagaatggattcccgttttctatcgcaatggcatttatcgccgaacaggcattcgccgcgctttatctgaatcccacctgatccgcgatattgccgctagtaaccccatggatcgcctggcaattctgcggtttctactggcgctagtttattggtgcaaaggcaatccatcggagaatcctggggctgaggggctagctggtaactgggacaaattagagaaggaaagagactgcttcgaattgctcggaacacgaagaagattctatcaatgcatgtccgcgcagcggctgcgcccaattactgatcttcttcaagaaattcctacgggcaataacttctggcattttcgccattgtcaggatggcaaggacggcctttgtctgccgtgctgcacaatgggtttattaagacttccgctatttagcgtcaccgggcttccaaatttgaaagcaggcatcaatggcgcgccgcctatttatgtcattccggtcggcagaacgcttgcggaaacattgcagatcaattggatgcgctgcgtggaaacaggaatgccagcgtggttggaaccgacgcagaggcctgcaccaggaacagaagtcccaatgctcaatggattgacggcgctgtctcgacgggtttttcttcaggagccgcatggcaaaggtatatgcgccaattgtggaactaatggattaccgctcataataacatgtggatatgaatcagccggcgaactaagaacagaacactggattgatccgcatgttctgtattccagcggcacgccccgcaaatccctgcaagcggccgatctcacctcagcaggaaaattccgcatggacaaaccccagtatgacttgcttgcacaaatgctaaaaaacatcccaagggatgggcatactcaaacaagattctggatcgtcgggttcgccacgcatcaagcaaaaaacatcgacgtctgggaatcttccgtggaattaccggcatgtattgctatgccagacgcgccgaagcttgtggaactatggcagaagcaaagtgcgtccatggttccccagcttggcaaaggcagaagtggcaaatctaaagcccgccgaaacaaagatattccagcacatatggccaacatccggccctatattgaacatactgtatcaaacagaataggccagatacttggaaaaggaattgaggcgtggcgcgaagttgccggcgagtatcgtccaatgatgcgcgttctggcagaatcgctgtccccaggtatttcttccagggcgcttcatcgtcgaagaacaatgcaaaccatcgtgccgcagatgcatctacccggagaggaaagaaagggccaatcaaagaaaagaggcgaagcgtgaccgcgaccgaagaatatatacagaagctcaccgagctgaaatcgggtgatctgggtttgctgcggacgcatggtgggcgaccgctagacgaatccgtagatggctttgatctgtttgccggattatggtggccgctgcgccgcgataatcccacggcgccacggcgcagcgtggcttggctgatcgccaaagtctttgctgcttgtccgatgcggcattctgccggcgacacattggcccggcaattggggcaatgcagtcgcaataatgcgcagcggcgacagcgactgcaagacaagttcgatgagatgcttgcccttcccctagatgaactggagccatgcctgaattgggcgctgcgcctgattgctgctggagcggagaagatcgactgggttcaactcacgaatgatctttcggactgggaaaatgaatcaaaacgcctggaatgggcaaaacaatacatcgaaaggatggaagtatcatgttgattgagatccacgctatacagaatcatgccccatccaacctgaaccgtgacgacttgggcgcgccaaaaacgtgttattttggaggcgtattacgatcgcgtatttccagccagtgtatcaagcgcagcattcgcatgagcgagcagttccgggccttgcttggtggggttgccaccaggcgacttgcgcagttgatcagcgaggggcaaagtgattcgttggcttcggaaagagcaatgaacatccttaagatttgcggcattgccccaaaagataaggttaaaggcaagaattcggaggaagaagccagcgaggatgacaagagcgccggtcgcgttttcaccacgcgcaaagcggttcaacaaatgtcggccttgttgaatggcaacggcatgagcgacgcgaaattagcggctgagtttgccaaaatcatcgccgaagaagttgccgctcctgacatggcgctctgtggaagaatgctggagcccaagaaagcaaagaaggaaaagaaaggcaaatcggaggatgaagaccagaatcaagatacaaacgaaaaaggagtatggaagggccttgatctgaatgtcgatgcagctttgcaggttggacatgccttttcaacgcatgaggcacgacctgaggtcgactacttcgtagcagcggacgatgttcgaggcgaagactccggagcggcctttgtagatgaggccatgttctcatccgcctgtttttacaaatacttttcgattaactgggaattgctggtcaggaatctccatggcaatgaggagcttgccgcgcatactgttggcgcatttattcgtgccgcggcgttgagtaacccaacaggaaagcagaacagctttgcggcgcataatcctccggacggcattctcgttgaactgaagcacacaccgatcagttatgcgaatgctttcgccaagccggcgtcgcaaggcagccgcgatattatttcccaaagcattgcccaattggcccaatatgcacacgacatggacactggatatggccagccggagcagcggttttggttttcccccaatctgcgcaatccgctgacgattattcaaaatcaaaaggaaacctccctgaccgagcagaactataagcgacttgatgacttggtgggcgcagtcattcaatgcatgggccaggactgggagcaggttcaaaacatttgcgtcgaacaagaggtgagcatatgagcgccaacacgctgtttctgcgccttgaggggccgatgcaagcgtggggggatcagcagtcgaaattcgttataaggcgcacggccgaagctcccactaaatccggtgttcttgggttgctatgcgcggcacttggcgttccacgcgccctagcacaagagcagtggctttcaaatctgaatgcactgagcatgggggtgcgtattgaccgtccaggcgtgcgatggtgggattaccacactgttggcgcgcgacagcagatgcaaatagctggcggcgggagcaaagagggggcgatgcttacgcgtcgtgaatacctgtgcgatgcctcctttctggtggcgctacagggcccccccgaactcatcttagaactgcacaacggattacggaagccagtctggacattataccttgggcgcaagaattgtccgccctcgcgtccagtattggaaacggcgccggctgattttcccaatctgataacagcgctttcgggcgttccctggcagccgcggctgaaggaaaatatgcatgaggcaccgcacagtcttgcctgtttattggactggctgcccagcgccgaacagactgaagccccggatgatgctcttatctgctacgatgtgccgcttacttttgacccaccggcgcacggcccgcgatttgtaatccgaatgcagttgcagatgggcgacaacggtgccgtcggcattggcacagaatcaacccagcgttacgcgccgcggccgctgcgcccgcgagcgaattatcgcaacacggaatatcgcaatgctcgagccgagcggttggaagatgatcatcatctttgcgtgttctgcaaatcgcttgccacaactgttcagcacatcacctacaggcgtgcgggtggcaaggaaacacacgatgaccttcgtgcgttgtgccgattgtgccacgatgcgataaccatgctggaatatggggcgggcatggggctggaccgcatcaacccggaagacccattgtatcgcgaccagattattgccaagcgcgctgaaatcattcagttccgttccctggaaatgcgccgtcgtcggctcgaaagcgaggaggcagaataatgtatatctccagactgttgatcgacattggaggaaatccggatcgaccccgaccgggccggcgctggctgagcaatgtttatcacgtgcatcaacggctctcgatggcttttccatcaaaggctttgaaagaaagcgatccggatttcctgcagccctatgatccgggtcattttgaacgtacccggttcctttttcgaatcgataaccagattgccgagaactgccctcgcgcaatgatcctcgtgcaatcccttgcggcaccggattgggactatgcctttcataatgccaggatgttccttgccgccgaaccggaagtgcgccaattcgatcctgccctgtatgagaacgaagcgttgcgtttccgcattcgcgttaatctaagcaagaagagcaagcatagccgtgaaggcgaacaattgagtaaaaagcgaggagaggttgattccaaaggtcgcctaaaggagcagagcaagcgcgttgcgctgacatggaaacgcgaagaaaatgagactccagatgaagtcatccggcaatggttcagtgagaaagggaaacactgcggatttgatctgcgcgattgccggctaatgcatttgggatggttaaccgcgtataagcccaaaatgaaatcaatgccagtagacggggaagatcctggccgtccgatgagattccgcacggcgcttcttgaagggaatctatgtattacagagttagacaggtttcgcgaaacgttggccacgggcatcggctcggctaaagccttcggcttcggcttactgagcatagctcgcgtttttgacgattagacttacatcggccccatgggggcagcatggaactgtgagcggagacacattccgatgcgcctgcacaatctgcacgacctgcccaaagtctgcgacagcctgacatatttatatgtcgagcattgccgtgttgagcaggaagaaaagtccattgccatttacgatcagtatggcatgaccccggtcccatgcgcctcgctcatgctgcttatgctggggccgggcgtggccatcacgcatgctgccatcctcaccctggccgacaacgattgcctcattgcctggtgcggcgaatacggtgtgcgcttctatgccgctggaagtggcgccacccgcagcgccacacggcttctgcgtcaggccatcctcgctacgcgcatgtccacacggctcgaagtcgttcggcggctctatgagatgcgcttcgccgaacccatagatcccgacctgacactgcaacagattcgcggcatggaaggcatgcgcgtgcgcagagcctatgcccaggtatccgccaacaccggcgtgccatggaatggtcgcagttatgagcgcaattcctggggagccagcgatcctgtgaaccgcgcattgtcctcggccaattcttgcctgtatggcgtctgccatgccgccatcgtggcggcgggttattctcctgccctgggattcattcacactggcaagcagctctcgttcgtctacgacgtggctgacctgtataagatggaacttacagtgcctgtggcattttctgtcgccgccagccacgacggccaagtcgagcgcgccgcgcgcatcctctgccgcgatgcctttgctcaggccgaccttctagggcgcatcgtcaaagacatggaacgcgccttggacattcgcctgcccgacgacgatgccgcccaattcgacgaagacccggcattgcccggaggactgtgggatcccgaacaaggcaccgtggccgggggacagaactacggcgaaacgtcagccgactccggaccggcggaggagctgcctttctgaaggagaacatcgcccatgatcgtcctcatcgttgaacgggcccccgcaggattacgcggagaactctcacgctggcttcttgaaccccaatccggagtgttcgttggcaaggtttccgctctggtgcggcagaagctttgggaacgcacctgtagagggctcaaaggcggtgcggccattctcatctggcgcaccaataacgagcagggattcgcgtttgaactgtggggcaatcccagccgcagcgtcaccgattgggatggcctgaaactgatcacggtgcaacatgaggggtatcccaaacgccgcggcgccagcacaagcaagaactttcaggatcctggcaccaacagtccttcagcctgacactattgttgccttccgcatcctaagttcaatagattgcagtatactccccacgcgcgtggggatgaaccgatgtcacgatctctggcggggataagcccatcatactccccacgcgcgtggggatgaaccgttaaaggacaccaagagtcttttggactctgcatactccccacgcgcgtggggatgaaccgcaactggcgagtcggggctagcccaatgaccatactccccacgcgcgtggggatgaaccgttgttatggccgatgatacgatcttgcttgcgatactccccacgcgcgtggggatgaaccgatgatcacatatacaccaaccgatgggccgctatactccccacgcgcgtggggatgaaccgtctggcaaatgatcaccatgaaaacatccagaatactccccacgcgcgtggggatgaaccggtctaacgcaataatcgggtggtagtgccatcatactccccacgcgcgtggggatgaaccggacgcactcgatttgttaagtaactggatgaagcaaggtatgaacgccg

SEQ ID NO: 1066 - DNA, 103799 bp, Artificial Sequence
  Synthetic Oligonucleotide
  misc_feature (1)..(94455): n is a, c, g, or t
nnnnnnnnnnnnnnnnnnnnnnnnnnnnnnnnnnnnnnnnnnnnnnnnnnnnnnnnnnnnnnnnnnnnnnnnnnnnnnnnnnnnnnnnnnnnnnnnnnnnnnnnnnnnnnnnnnnnnnnnnnnnnnnnnnnnnnnnnnnnnnnnnnnnnnnnnnnnnnnnnnnnnnnnnnnnnnnnnnnnnnnnnnnnnnnnnnnnnnnnnnnnnnnnnnnnnnnnnnnnnnnnnnnnnnnnnnnnnnnnnnnnnnnnnnnnnnnnnnnnnnnnnnnnnnnnnnnnnnnnnnnnnnnnnnnnnnnnnnnnnnnnnnnnnnnnnnnnnnnnnnnnnnnnnnnnnnnnnnnnnnnnnnnnnnnnnnnnnnnnnnnnnnnnnnnnnnnnnnnnnnnnnnnnnnnnnnnnnnnnnnnnnnnnnnnnnnnnnnnnnnnnnnnnnnnnnnnnnnnnnnnnnnnnnnnnnnnnnnnnnnnnnnnnnnnnnnnnnnnnnnnnnnnnnnnnnnnnnnnnnnnnnnnnnnnnnnnnnnnnnnnnnnnnnnnnnnnnnnnnnnnnnnnnnnnnnnnnnnnnnnnnnnnnnnnnnnnnnnnnnnnnnnnnnnnnnnnnnnnnnnnnnnnnnnnnnnnnnnnnnnnnnnnnnnnnnnnnnnnnnnnnnnnnnnnnnnnnnnnnnnnnnnnnnnnnnnnnnnnnnnnnnnnnnnnnnnnnnnnnnnnnnnnnnnnnnnnnnnnnnnnnnnnnnnnnnnnnnnnnnnnnnnnnnnnnnnnnnnnnnnnnnnnnnnnnnnnnnnnnnnnnnnnnnnnnnnnnnnnnnnnnnnnnnnnnnnnnnnnnnnnnnnnnnnnnnnnnnnnnnnnnnnnnnnnnnnnnnnnnnnnnnnnnnnnnnnnnnnnnnnnnnnnnnnnnnnnnnnnnnnnnnnnnnnnnnnnnnnnnnnnnnnnnnnnnnnnnnnnnnnnnnnnnnnnnnnnnnnnnnnnnnnnnnnnnnnnnnnnnnnnnnnnnnnnnnnnnnnnnnnnnnnnnnnnnnnnnnnnnnnnnnnnnnnnnnnnnnnnnnnnnnnnnnnnnnnnnnnnnnnnnnnnnnnnnnnnnnnnnnnnnnnnnnnnnnnnnnnnnnnnnnnnnnnnnnnnnnnnnnnnnnnnnnnnnnnnnnnnnnnnnnnnnnnnnnnnnnnnnnnnnnnnnnnnnnnnnnnnnnnnnnnnnnnnnnnnnnnnnnnnnnnnnnnnnnnnnnnnnnnnnnnnnnnnnnnnnnnnnnnnnnnnnnnnnnnnnnnnnnnnnnnnnnnnnnnnnnnnnnnnnnnnnnnnnnnnnnnnnnnnnnnnnnnnnnnnnnnnnnnnnnnnnnnnnnnnnnnnnnnnnnnnnnnnnnnnnnnnnnnnnnnnnnnnnnnnnnnnnnnnnnnnnnnnnnnnnnnnnnnnnnnnnnnnnnnnnnnnnnnnnnnnnnnnnnnnnnnnnnnnnnnnnnnnnnnnnnnnnnnnnnnnnnnnnnnnnnnnnnnnnnnnnnnnnnnnnnnnnnnnnnnnnnnnnnnnnnnnnnnnnnnnnnnnnnnnnnnnnnnnnnnnnnnnnnnnnnnnnnnnnnnnnnnnnnnnnnnnnnnnnnnnnnnnnnnnnnnnnnnnnnnnnnnnnnnnnnnnnnnnnnnnnnnnnnnnnnnnnnnnnnnnnnnnnnnnnnnnnnnnnnnnnnnnnnnnnnnnnnnnnnnnnnnnnnnnnnnnnnnnnnnnnnnnnnnnnnnnnnnnnnnnnnnnnnnnnnnnnnnnnnnnnnnnnnnnnnnnnnnnnnnnnnnnnnnnnnnnnnnnnnnnnnnnnnnnnnnnnnnnnnnnnnnnnnnnnnnnnnnnnnnnnnnnnnnnnnnnnnnnnnnnnnnnnnnnnnnnnnnnnnnnnnnnnnnnnnnnnnnnnnnnnnnnnnnnnnnnnnnnnnnnnnnnnnnnnnnnnnnnnnnnnnnnnnnnnnnnnnnnnnnnnnnnnnnnnnnnnnnnnnnnnnnnnnnnnnnnnnnnnnnnnnnnnnnnnnnnnnnnnnnnnnnnnnnnnnnnnnnnnnnnnnnnnnnnnnnnnnnnnnnnnnnnnnnnnnnnnnnnnnnnnnnnnnnnnnnnnnnnnnnnnnnnnnnnnnnnnnnnnnnnnnnnnnnnnnnnnnnnnnnnnnnnnnnnnnnnnnnnnnnnnnnnnnnnnnnnnnnnnnnnnnnnnnnnnnnnnnnnnnnnnnnnnnnnnnnnnnnnnnnnnnnnnnnnnnnnnnnnnnnnnnnnnnnnnnnnnnnnnnnnnnnnnnnnnnnnnnnnnnnnnnnnnnnnnnnnnnnnnnnnnnnnnnnnnnnnnnnnnnnnnnnnnnnnnnnnnnnnnnnnnnnnnnnnnnnnnnnnnnnnnnnnnnnnnnnnnnnnnnnnnnnnnnnnnnnnnnnnnnnnnnnnnnnnnnnnnnnnnnnnnnnnnnnnnnnnnnnnnnnnnnnnnnnnnnnnnnnnnnnnnnnnnnnnnnnnnnnnnnnnnnnnnnnnnnnnnnnnnnnnnnnnnnnnnnnnnnnnnnnnnnnnnnnnnnnnnnnnnnnnnnnnnnnnnnnnnnnnnnnnnnnnnnnnnnnnnnnnnnnnnnnnnnnnnnnnnnnnnnnnnnnnnnnnnnnnnnnnnnnnnnnnnnnnnnnnnnnnnnnnnnnnnnnnnnnnnnnnnnnnnnnnnnnnnnnnnnnnnnnnnnnnnnnnnnnnnnnnnnnnnnnnnnnnnnnnnnnnnnnnnnnnnnnnnnnnnnnnnnnnnnnnnnnnnnnnnnnnnnnnnnnnnnnnnnnnnnnnnnnnnnnnnnnnnnnnnnnnnnnnnnnnnnnnnnnnnnnnnnnnnnnnnnnnnnnnnnnnnnnnnnnnnnnnnnnnnnnnnnnnnnnnnnnnnnnnnnnnnnnnnnnnnnnnnnnnnnnnnnnnnnnnnnnnnnnnnnnnnnnnnnnnnnnnnnnnnnnnnnnnnnnnnnnnnnnnnnnnnnnnnnnnnnnnnnnnnnnnnnnnnnnnnnnnnnnnnnnnnnnnnnnnnnnnnnnnnnnnnnnnnnnnnnnnnnnnnnnnnnnnnnnnnnnnnnnnnnnnnnnnnnnnnnnnnnnnnnnnnnnnnnnnnnnnnnnnnnnnnnnnnnnnnnnnnnnnnnnnnnnnnnnnnnnnnnnnnnnnnnnnnnnnnnnnnnnnnnnnnnnnnnnnnnnnnnnnnnnnnnnnnnnnnnnnnnnnnnnnnnnnnnnnnnnnnnnnnnnnnnnnnnnnnnnnnnnnnnnnnnnnnnnnnnnnnnnnnnnnnnnnnnnnnnnnnnnnnnnnnnnnnnnnnnnnnnnnnnnnnnnnnnnnnnnnnnnnnnnnnnnnnnnnnnnnnnnnnnnnnnnnnnnnnnnnnnnnnnnnnnnnnnnnnnnnnnnnnnnnnnnnnnnnnnnnnnnnnnnnnnnnnnnnnnnnnnnnnnnnnnnnnnnnnnnnnnnnnnnnnnnnnnnnnnnnnnnnnnnnnnnnnnnnnnnnnnnnnnnnnnnnnnnnnnnnnnnnnnnnnnnnnnnnnnnnnnnnnnnnnnnnnnnnnnnnnnnnnnnnnnnnnnnnnnnnnnnnnnnnnnnnnnnnnnnnnnnnnnnnnnnnnnnnnnnnnnnnnnnnnnnnnnnnnnnnnnnnnnnnnnnnnnnnnnnnnnnnnnnnnnnnnnnnnnnnnnnnnnnnnnnnnnnnnnnnnnnnnnnnnnnnnnnnnnnnnnnnnnnnnnnnnnnnnnnnnnnnnnnnnnnnnnnnnnnnnnnnnnnnnnnnnnnnnnnnnnnnnnnnnnnnnnnnnnnnnnnnnnnnnnnnnnnnnnnnnnnnnnnnnnnnnnnnnnnnnnnnnnnnnnnnnnnnnnnnnnnnnnnnnnnnnnnnnnnnnnnnnnnnnnnnnnnnnnnnnnnnnnnnnnnnnnnnnnnnnnnnnnnnnnnnnnnnnnnnnnnnnnnnnnnnnnnnnnnnnnnnnnnnnnnnnnnnnnnnnnnnnnnnnnnnnnnnnnnnnnnnnnnnnnnnnnnnnnnnnnnnnnnnnnnnnnnnnnnnnnnnnnnnnnnnnnnnnnnnnnnnnnnnnnnnnnnnnnnnnnnnnnnnnnnnnnnnnnnnnnnnnnnnnnnnnnnnnnnnnnnnnnnnnnnnnnnnnnnnnnnnnnnnnnnnnnnnnnnnnnnnnnnnnnnnnnnnnnnnnnnnnnnnnnnnnnnnnnnnnnnnnnnnnnnnnnnnnnnnnnnnnnnnnnnnnnnnnnnnnnnnnnnnnnnnnnnnnnnnnnnnnnnnnnnnnnnnnnnnnnnnnnnnnnnnnnnnnnnnnnnnnnnnnnnnnnnnnnnnnnnnnnnnnnnnnnnnnnnnnnnnnnnnnnnnnnnnnnnnnnnnnnnnnnnnnnnnnnnnnnnnnnnnnnnnnnnnnnnnnnnnnnnnnnnnnnnnnnnnnnnnnnnnnnnnnnnnnnnnnnnnnnnnnnnnnnnnnnnnnnnnnnnnnnnnnnnnnnnnnnnnnnnnnnnnnnnnnnnnnnnnnnnnnnnnnnnnnnnnnnnnnnnnnnnnnnnnnnnnnnnnnnnnnnnnnnnnnnnnnnnnnnnnnnnnnnnnnnnnnnnnnnnnnnnnnnnnnnnnnnnnnnnnnnnnnnnnnnnnnnnnnnnnnnnnnnnnnnnnnnnnnnnnnnnnnnnnnnnnnnnnnnnnnnnnnnnnnnnnnnnnnnnnnnnnnnnnnnnnnnnnnnnnnnnnnnnnnnnnnnnnnnnnnnnnnnnnnnnnnnnnnnnnnnnnnnnnnnnnnnnnnnnnnnnnnnnnnnnnnnnnnnnnnnnnnnnnnnnnnnnnnnnnnnnnnnnnnnnnnnnnnnnnnnnnnnnnnnnnnnnnnnnnnnnnnnnnnnnnnnnnnnnnnnnnnnnnnnnnnnnnnnnnnnnnnnnnnnnnnnnnnnnnnnnnnnnnnnnnnnnnnnnnnnnnnnnnnnnnnnnnnnnnnnnnnnnnnnnnnnnnnnnnnnnnnnnnnnnnnnnnnnnnnnnnnnnnnnnnnnnnnnnnnnnnnnnnnnnnnnnnnnnnnnnnnnnnnnnnnnnnnnnnnnnnnnnnnnnnnnnnnnnnnnnnnnnnnnnnnnnnnnnnnnnnnnnnnnnnnnnnnnnnnnnnnnnnnnnnnnnnnnnnnnnnnnnnnnnnnnnnnnnnnnnnnnnnnnnnnnnnnnnnnnnnnnnnnnnnnnnnnnnnnnnnnnnnnnnnnnnnnnnnnnnnnnnnnnnnnnnnnnnnnnnnnnnnnnnnnnnnnnnnnnnnnnnnnnnnnnnnnnnnnnnnnnnnnnnnnnnnnnnnnnnnnnnnnnnnnnnnnnnnnnnnnnnnnnnnnnnnnnnnnnnnnnnnnnnnnnnnnnnnnnnnnnnnnnnnnnnnnnnnnnnnnnnnnnnnnnnnnnnnnnnnnnnnnnnnnnnnnnnnnnnnnnnnnnnnnnnnnnnnnnnnnnnnnnnnnnnnnnnnnnnnnnnnnnnnnnnnnnnnnnnnnnnnnnnnnnnnnnnnnnnnnnnnnnnnnnnnnnnnnnnnnnnnnnnnnnnnnnnnnnnnnnnnnnnnnnnnnnnnnnnnnnnnnnnnnnnnnnnnnnnnnnnnnnnnnnnnnnnnnnnnnnnnnnnnnnnnnnnnnnnnnnnnnnnnnnnnnnnnnnnnnnnnnnnnnnnnnnnnnnnnnnnnnnnnnnnnnnnnnnnnnnnnnnnnnnnnnnnnnnnnnnnnnnnnnnnnnnnnnnnnnnnnnnnnnnnnnnnnnnnnnnnnnnnnnnnnnnnnnnnnnnnnnnnnnnnnnnnnnnnnnnnnnnnnnnnnnnnnnnnnnnnnnnnnnnnnnnnnnnnnnnnnnnnnnnnnnnnnnnnnnnnnnnnnnnnnnnnnnnnnnnnnnnnnnnnnnnnnnnnnnnnnnnnnnnnnnnnnnnnnnnnnnnnnnnnnnnnnnnnnnnnnnnnnnnnnnnnnnnnnnnnnnnnnnnnnnnnnnnnnnnnnnnnnnnnnnnnnnnnnnnnnnnnnnnnnnnnnnnnnnnnnnnnnnnnnnnnnnnnnnnnnnnnnnnnnnnnnnnnnnnnnnnnnnnnnnnnnnnnnnnnnnnnnnnnnnnnnnnnnnnnnnnnnnnnnnnnnnnnnnnnnnnnnnnnnnnnnnnnnnnnnnnnnnnnnnnnnnnnnnnnnnnnnnnnnnnnnnnnnnnnnnnnnnnnnnnnnnnnnnnnnnnnnnnnnnnnnnnnnnnnnnnnnnnnnnnnnnnnnnnnnnnnnnnnnnnnnnnnnnnnnnnnnnnnnnnnnnnnnnnnnnnnnnnnnnnnnnnnnnnnnnnnnnnnnnnnnnnnnnnnnnnnnnnnnnnnnnnnnnnnnnnnnnnnnnnnnnnnnnnnnnnnnnnnnnnnnnnnnnnnnnnnnnnnnnnnnnnnnnnnnnnnnnnnnnnnnnnnnnnnnnnnnnnnnnnnnnnnnnnnnnnnnnnnnnnnnnnnnnnnnnnnnnnnnnnnnnnnnnnnnnnnnnnnnnnnnnnnnnnnnnnnnnnnnnnnnnnnnnnnnnnnnnnnnnnnnnnnnnnnnnnnnnnnnnnnnnnnnnnnnnnnnnnnnnnnnnnnnnnnnnnnnnnnnnnnnnnnnnnnnnnnnnnnnnnnnnnnnnnnnnnnnnnnnnnnnnnnnnnnnnnnnnnnnnnnnnnnnnnnnnnnnnnnnnnnnnnnnnnnnnnnnnnnnnnnnnnnnnnnnnnnnnnnnnnnnnnnnnnnnnnnnnnnnnnnnnnnnnnnnnnnnnnnnnnnnnnnnnnnnnnnnnnnnnnnnnnnnnnnnnnnnnnnnnnnnnnnnnnnnnnnnnnnnnnnnnnnnnnnnnnnnnnnnnnnnnnnnnnnnnnnnnnnnnnnnnnnnnnnnnnnnnnnnnnnnnnnnnnnnnnnnnnnnnnnnnnnnnnnnnnnnnnnnnnnnnnnnnnnnnnnnnnnnnnnnnnnnnnnnnnnnnnnnnnnnnnnnnnnnnnnnnnnnnnnnnnnnnnnnnnnnnnnnnnnnnnnnnnnnnnnnnnnnnnnnnnnnnnnnnnnnnnnnnnnnnnnnnnnnnnnnnnnnnnnnnnnnnnnnnnnnnnnnnnnnnnnnnnnnnnnnnnnnnnnnnnnnnnnnnnnnnnnnnnnnnnnnnnnnnnnnnnnnnnnnnnnnnnnnnnnnnnnnnnnnnnnnnnnnnnnnnnnnnnnnnnnnnnnnnnnnnnnnnnnnnnnnnnnnnnnnnnnnnnnnnnnnnnnnnnnnnnnnnnnnnnnnnnnnnnnnnnnnnnnnnnnnnnnnnnnnnnnnnnnnnnnnnnnnnnnnnnnnnnnnnnnnnnnnnnnnnnnnnnnnnnnnnnnnnnnnnnnnnnnnnnnnnnnnnnnnnnnnnnnnnnnnnnnnnnnnnnnnnnnnnnnnnnnnnnnnnnnnnnnnnnnnnnnnnnnnnnnnnnnnnnnnnnnnnnnnnnnnnnnnnnnnnnnnnnnnnnnnnnnnnnnnnnnnnnnnnnnnnnnnnnnnnnnnnnnnnnnnnnnnnnnnnnnnnnnnnnnnnnnnnnnnnnnnnnnnnnnnnnnnnnnnnnnnnnnnnnnnnnnnnnnnnnnnnnnnnnnnnnnnnnnnnnnnnnnnnnnnnnnnnnnnnnnnnnnnnnnnnnnnnnnnnnnnnnnnnnnnnnnnnnnnnnnnnnnnnnnnnnnnnnnnnnnnnnnnnnnnnnnnnnnnnnnnnnnnnnnnnnnnnnnnnnnnnnnnnnnnnnnnnnnnnnnnnnnnnnnnnnnnnnnnnnnnnnnnnnnnnnnnnnnnnnnnnnnnnnnnnnnnnnnnnnnnnnnnnnnnnnnnnnnnnnnnnnnnnnnnnnnnnnnnnnnnnnnnnnnnnnnnnnnnnnnnnnnnnnnnnnnnnnnnnnnnnnnnnnnnnnnnnnnnnnnnnnnnnnnnnnnnnnnnnnnnnnnnnnnnnnnnnnnnnnnnnnnnnnnnnnnnnnnnnnnnnnnnnnnnnnnnnnnnnnnnnnnnnnnnnnnnnnnnnnnnnnnnnnnnnnnnnnnnnnnnnnnnnnnnnnnnnnnnnnnnnnnnnnnnnnnnnnnnnnnnnnnnnnnnnnnnnnnnnnnnnnnnnnnnnnnnnnnnnnnnnnnnnnnnnnnnnnnnnnnnnnnnnnnnnnnnnnnnnnnnnnnnnnnnnnnnnnnnnnnnnnnnnnnnnnnnnnnnnnnnnnnnnnnnnnnnnnnnnnnnnnnnnnnnnnnnnnnnnnnnnnnnnnnnnnnnnnnnnnnnnnnnnnnnnnnnnnnnnnnnnnnnnnnnnnnnnnnnnnnnnnnnnnnnnnnnnnnnnnnnnnnnnnnnnnnnnnnnnnnnnnnnnnnnnnnnnnnnnnnnnnnnnnnnnnnnnnnnnnnnnnnnnnnnnnnnnnnnnnnnnnnnnnnnnnnnnnnnnnnnnnnnnnnnnnnnnnnnnnnnnnnnnnnnnnnnnnnnnnnnnnnnnnnnnnnnnnnnnnnnnnnnnnnnnnnnnnnnnnnnnnnnnnnnnnnnnnnnnnnnnnnnnnnnnnnnnnnnnnnnnnnnnnnnnnnnnnnnnnnnnnnnnnnnnnnnnnnnnnnnnnnnnnnnnnnnnnnnnnnnnnnnnnnnnnnnnnnnnnnnnnnnnnnnnnnnnnnnnnnnnnnnnnnnnnnnnnnnnnnnnnnnnnnnnnnnnnnnnnnnnnnnnnnnnnnnnnnnnnnnnnnnnnnnnnnnnnnnnnnnnnnnnnnnnnnnnnnnnnnnnnnnnnnnnnnnnnnnnnnnnnnnnnnnnnnnnnnnnnnnnnnnnnnnnnnnnnnnnnnnnnnnnnnnnnnnnnnnnnnnnnnnnnnnnnnnnnnnnnnnnnnnnnnnnnnnnnnnnnnnnnnnnnnnnnnnnnnnnnnnnnnnnnnnnnnnnnnnnnnnnnnnnnnnnnnnnnnnnnnnnnnnnnnnnnnnnnnnnnnnnnnnnnnnnnnnnnnnnnnnnnnnnnnnnnnnnnnnnnnnnnnnnnnnnnnnnnnnnnnnnnnnnnnnnnnnnnnnnnnnnnnnnnnnnnnnnnnnnnnnnnnnnnnnnnnnnnnnnnnnnnnnnnnnnnnnnnnnnnnnnnnnnnnnnnnnnnnnnnnnnnnnnnnnnnnnnnnnnnnnnnnnnnnnnnnnnnnnnnnnnnnnnnnnnnnnnnnnnnnnnnnnnnnnnnnnnnnnnnnnnnnnnnnnnnnnnnnnnnnnnnnnnnnnnnnnnnnnnnnnnnnnnnnnnnnnnnnnnnnnnnnnnnnnnnnnnnnnnnnnnnnnnnnnnnnnnnnnnnnnnnnnnnnnnnnnnnnnnnnnnnnnnnnnnnnnnnnnnnnnnnnnnnnnnnnnnnnnnnnnnnnnnnnnnnnnnnnnnnnnnnnnnnnnnnnnnnnnnnnnnnnnnnnnnnnnnnnnnnnnnnnnnnnnnnnnnnnnnnnnnnnnnnnnnnnnnnnnnnnnnnnnnnnnnnnnnnnnnnnnnnnnnnnnnnnnnnnnnnnnnnnnnnnnnnnnnnnnnnnnnnnnnnnnnnnnnnnnnnnnnnnnnnnnnnnnnnnnnnnnnnnnnnnnnnnnnnnnnnnnnnnnnnnnnnnnnnnnnnnnnnnnnnnnnnnnnnnnnnnnnnnnnnnnnnnnnnnnnnnnnnnnnnnnnnnnnnnnnnnnnnnnnnnnnnnnnnnnnnnnnnnnnnnnnnnnnnnnnnnnnnnnnnnnnnnnnnnnnnnnnnnnnnnnnnnnnnnnnnnnnnnnnnnnnnnnnnnnnnnnnnnnnnnnnnnnnnnnnnnnnnnnnnnnnnnnnnnnnnnnnnnnnnnnnnnnnnnnnnnnnnnnnnnnnnnnnnnnnnnnnnnnnnnnnnnnnnnnnnnnnnnnnnnnnnnnnnnnnnnnnnnnnnnnnnnnnnnnnnnnnnnnnnnnnnnnnnnnnnnnnnnnnnnnnnnnnnnnnnnnnnnnnnnnnnnnnnnnnnnnnnnnnnnnnnnnnnnnnnnnnnnnnnnnnnnnnnnnnnnnnnnnnnnnnnnnnnnnnnnnnnnnnnnnnnnnnnnnnnnnnnnnnnnnnnnnnnnnnnnnnnnnnnnnnnnnnnnnnnnnnnnnnnnnnnnnnnnnnnnnnnnnnnnnnnnnnnnnnnnnnnnnnnnnnnnnnnnnnnnnnnnnnnnnnnnnnnnnnnnnnnnnnnnnnnnnnnnnnnnnnnnnnnnnnnnnnnnnnnnnnnnnnnnnnnnnnnnnnnnnnnnnnnnnnnnnnnnnnnnnnnnnnnnnnnnnnnnnnnnnnnnnnnnnnnnnnnnnnnnnnnnnnnnnnnnnnnnnnnnnnnnnnnnnnnnnnnnnnnnnnnnnnnnnnnnnnnnnnnnnnnnnnnnnnnnnnnnnnnnnnnnnnnnnnnnnnnnnnnnnnnnnnnnnnnnnnnnnnnnnnnnnnnnnnnnnnnnnnnnnnnnnnnnnnnnnnnnnnnnnnnnnnnnnnnnnnnnnnnnnnnnnnnnnnnnnnnnnnnnnnnnnnnnnnnnnnnnnnnnnnnnnnnnnnnnnnnnnnnnnnnnnnnnnnnnnnnnnnnnnnnnnnnnnnnnnnnnnnnnnnnnnnnnnnnnnnnnnnnnnnnnnnnnnnnnnnnnnnnnnnnnnnnnnnnnnnnnnnnnnnnnnnnnnnnnnnnnnnnnnnnnnnnnnnnnnnnnnnnnnnnnnnnnnnnnnnnnnnnnnnnnnnnnnnnnnnnnnnnnnnnnnnnnnnnnnnnnnnnnnnnnnnnnnnnnnnnnnnnnnnnnnnnnnnnnnnnnnnnnnnnnnnnnnnnnnnnnnnnnnnnnnnnnnnnnnnnnnnnnnnnnnnnnnnnnnnnnnnnnnnnnnnnnnnnnnnnnnnnnnnnnnnnnnnnnnnnnnnnnnnnnnnnnnnnnnnnnnnnnnnnnnnnnnnnnnnnnnnnnnnnnnnnnnnnnnnnnnnnnnnnnnnnnnnnnnnnnnnnnnnnnnnnnnnnnnnnnnnnnnnnnnnnnnnnnnnnnnnnnnnnnnnnnnnnnnnnnnnnnnnnnnnnnnnnnnnnnnnnnnnnnnnnnnnnnnnnnnnnnnnnnnnnnnnnnnnnnnnnnnnnnnnnnnnnnnnnnnnnnnnnnnnnnnnnnnnnnnnnnnnnnnnnnnnnnnnnnnnnnnnnnnnnnnnnnnnnnnnnnnnnnnnnnnnnnnnnnnnnnnnnnnnnnnnnnnnnnnnnnnnnnnnnnnnnnnnnnnnnnnnnnnnnnnnnnnnnnnnnnnnnnnnnnnnnnnnnnnnnnnnnnnnnnnnnnnnnnnnnnnnnnnnnnnnnnnnnnnnnnnnnnnnnnnnnnnnnnnnnnnnnnnnnnnnnnnnnnnnnnnnnnnnnnnnnnnnnnnnnnnnnnnnnnnnnnnnnnnnnnnnnnnnnnnnnnnnnnnnnnnnnnnnnnnnnnnnnnnnnnnnnnnnnnnnnnnnnnnnnnnnnnnnnnnnnnnnnnnnnnnnnnnnnnnnnnnnnnnnnnnnnnnnnnnnnnnnnnnnnnnnnnnnnnnnnnnnnnnnnnnnnnnnnnnnnnnnnnnnnnnnnnnnnnnnnnnnnnnnnnnnnnnnnnnnnnnnnnnnnnnnnnnnnnnnnnnnnnnnnnnnnnnnnnnnnnnnnnnnnnnnnnnnnnnnnnnnnnnnnnnnnnnnnnnnnnnnnnnnnnnnnnnnnnnnnnnnnnnnnnnnnnnnnnnnnnnnnnnnnnnnnnnnnnnnnnnnnnnnnnnnnnnnnnnnnnnnnnnnnnnnnnnnnnnnnnnnnnnnnnnnnnnnnnnnnnnnnnnnnnnnnnnnnnnnnnnnnnnnnnnnnnnnnnnnnnnnnnnnnnnnnnnnnnnnnnnnnnnnnnnnnnnnnnnnnnnnnnnnnnnnnnnnnnnnnnnnnnnnnnnnnnnnnnnnnnnnnnnnnnnnnnnnnnnnnnnnnnnnnnnnnnnnnnnnnnnnnnnnnnnnnnnnnnnnnnnnnnnnnnnnnnnnnnnnnnnnnnnnnnnnnnnnnnnnnnnnnnnnnnnnnnnnnnnnnnnnnnnnnnnnnnnnnnnnnnnnnnnnnnnnnnnnnnnnnnnnnnnnnnnnnnnnnnnnnnnnnnnnnnnnnnnnnnnnnnnnnnnnnnnnnnnnnnnnnnnnnnnnnnnnnnnnnnnnnnnnnnnnnnnnnnnnnnnnnnnnnnnnnnnnnnnnnnnnnnnnnnnnnnnnnnnnnnnnnnnnnnnnnnnnnnnnnnnnnnnnnnnnnnnnnnnnnnnnnnnnnnnnnnnnnnnnnnnnnnnnnnnnnnnnnnnnnnnnnnnnnnnnnnnnnnnnnnnnnnnnnnnnnnnnnnnnnnnnnnnnnnnnnnnnnnnnnnnnnnnnnnnnnnnnnnnnnnnnnnnnnnnnnnnnnnnnnnnnnnnnnnnnnnnnnnnnnnnnnnnnnnnnnnnnnnnnnnnnnnnnnnnnnnnnnnnnnnnnnnnnnnnnnnnnnnnnnnnnnnnnnnnnnnnnnnnnnnnnnnnnnnnnnnnnnnnnnnnnnnnnnnnnnnnnnnnnnnnnnnnnnnnnnnnnnnnnnnnnnnnnnnnnnnnnnnnnnnnnnnnnnnnnnnnnnnnnnnnnnnnnnnnnnnnnnnnnnnnnnnnnnnnnnnnnnnnnnnnnnnnnnnnnnnnnnnnnnnnnnnnnnnnnnnnnnnnnnnnnnnnnnnnnnnnnnnnnnnnnnnnnnnnnnnnnnnnnnnnnnnnnnnnnnnnnnnnnnnnnnnnnnnnnnnnnnnnnnnnnnnnnnnnnnnnnnnnnnnnnnnnnnnnnnnnnnnnnnnnnnnnnnnnnnnnnnnnnnnnnnnnnnnnnnnnnnnnnnnnnnnnnnnnnnnnnnnnnnnnnnnnnnnnnnnnnnnnnnnnnnnnnnnnnnnnnnnnnnnnnnnnnnnnnnnnnnnnnnnnnnnnnnnnnnnnnnnnnnnnnnnnnnnnnnnnnnnnnnnnnnnnnnnnnnnnnnnnnnnnnnnnnnnnnnnnnnnnnnnnnnnnnnnnnnnnnnnnnnnnnnnnnnnnnnnnnnnnnnnnnnnnnnnnnnnnnnnnnnnnnnnnnnnnnnnnnnnnnnnnnnnnnnnnnnnnnnnnnnnnnnnnnnnnnnnnnnnnnnnnnnnnnnnnnnnnnnnnnnnnnnnnnnnnnnnnnnnnnnnnnnnnnnnnnnnnnnnnnnnnnnnnnnnnnnnnnnnnnnnnnnnnnnnnnnnnnnnnnnnnnnnnnnnnnnnnnnnnnnnnnnnnnnnnnnnnnnnnnnnnnnnnnnnnnnnnnnnnnnnnnnnnnnnnnnnnnnnnnnnnnnnnnnnnnnnnnnnnnnnnnnnnnnnnnnnnnnnnnnnnnnnnnnnnnnnnnnnnnnnnnnnnnnnnnnnnnnnnnnnnnnnnnnnnnnnnnnnnnnnnnnnnnnnnnnnnnnnnnnnnnnnnnnnnnnnnnnnnnnnnnnnnnnnnnnnnnnnnnnnnnnnnnnnnnnnnnnnnnnnnnnnnnnnnnnnnnnnnnnnnnnnnnnnnnnnnnnnnnnnnnnnnnnnnnnnnnnnnnnnnnnnnnnnnnnnnnnnnnnnnnnnnnnnnnnnnnnnnnnnnnnnnnnnnnnnnnnnnnnnnnnnnnnnnnnnnnnnnnnnnnnnnnnnnnnnnnnnnnnnnnnnnnnnnnnnnnnnnnnnnnnnnnnnnnnnnnnnnnnnnnnnnnnnnnnnnnnnnnnnnnnnnnnnnnnnnnnnnnnnnnnnnnnnnnnnnnnnnnnnnnnnnnnnnnnnnnnnnnnnnnnnnnnnnnnnnnnnnnnnnnnnnnnnnnnnnnnnnnnnnnnnnnnnnnnnnnnnnnnnnnnnnnnnnnnnnnnnnnnnnnnnnnnnnnnnnnnnnnnnnnnnnnnnnnnnnnnnnnnnnnnnnnnnnnnnnnnnnnnnnnnnnnnnnnnnnnnnnnnnnnnnnnnnnnnnnnnnnnnnnnnnnnnnnnnnnnnnnnnnnnnnnnnnnnnnnnnnnnnnnnnnnnnnnnnnnnnnnnnnnnnnnnnnnnnnnnnnnnnnnnnnnnnnnnnnnnnnnnnnnnnnnnnnnnnnnnnnnnnnnnnnnnnnnnnnnnnnnnnnnnnnnnnnnnnnnnnnnnnnnnnnnnnnnnnnnnnnnnnnnnnnnnnnnnnnnnnnnnnnnnnnnnnnnnnnnnnnnnnnnnnnnnnnnnnnnnnnnnnnnnnnnnnnnnnnnnnnnnnnnnnnnnnnnnnnnnnnnnnnnnnnnnnnnnnnnnnnnnnnnnnnnnnnnnnnnnnnnnnnnnnnnnnnnnnnnnnnnnnnnnnnnnnnnnnnnnnnnnnnnnnnnnnnnnnnnnnnnnnnnnnnnnnnnnnnnnnnnnnnnnnnnnnnnnnnnnnnnnnnnnnnnnnnnnnnnnnnnnnnnnnnnnnnnnnnnnnnnnnnnnnnnnnnnnnnnnnnnnnnnnnnnnnnnnnnnnnnnnnnnnnnnnnnnnnnnnnnnnnnnnnnnnnnnnnnnnnnnnnnnnnnnnnnnnnnnnnnnnnnnnnnnnnnnnnnnnnnnnnnnnnnnnnnnnnnnnnnnnnnnnnnnnnnnnnnnnnnnnnnnnnnnnnnnnnnnnnnnnnnnnnnnnnnnnnnnnnnnnnnnnnnnnnnnnnnnnnnnnnnnnnnnnnnnnnnnnnnnnnnnnnnnnnnnnnnnnnnnnnnnnnnnnnnnnnnnnnnnnnnnnnnnnnnnnnnnnnnnnnnnnnnnnnnnnnnnnnnnnnnnnnnnnnnnnnnnnnnnnnnnnnnnnnnnnnnnnnnnnnnnnnnnnnnnnnnnnnnnnnnnnnnnnnnnnnnnnnnnnnnnnnnnnnnnnnnnnnnnnnnnnnnnnnnnnnnnnnnnnnnnnnnnnnnnnnnnnnnnnnnnnnnnnnnnnnnnnnnnnnnnnnnnnnnnnnnnnnnnnnnnnnnnnnnnnnnnnnnnnnnnnnnnnnnnnnnnnnnnnnnnnnnnnnnnnnnnnnnnnnnnnnnnnnnnnnnnnnnnnnnnnnnnnnnnnnnnnnnnnnnnnnnnnnnnnnnnnnnnnnnnnnnnnnnnnnnnnnnnnnnnnnnnnnnnnnnnnnnnnnnnnnnnnnnnnnnnnnnnnnnnnnnnnnnnnnnnnnnnnnnnnnnnnnnnnnnnnnnnnnnnnnnnnnnnnnnnnnnnnnnnnnnnnnnnnnnnnnnnnnnnnnnnnnnnnnnnnnnnnnnnnnnnnnnnnnnnnnnnnnnnnnnnnnnnnnnnnnnnnnnnnnnnnnnnnnnnnnnnnnnnnnnnnnnnnnnnnnnnnnnnnnnnnnnnnnnnnnnnnnnnnnnnnnnnnnnnnnnnnnnnnnnnnnnnnnnnnnnnnnnnnnnnnnnnnnnnnnnnnnnnnnnnnnnnnnnnnnnnnnnnnnnnnnnnnnnnnnnnnnnnnnnnnnnnnnnnnnnnnnnnnnnnnnnnnnnnnnnnnnnnnnnnnnnnnnnnnnnnnnnnnnnnnnnnnnnnnnnnnnnnnnnnnnnnnnnnnnnnnnnnnnnnnnnnnnnnnnnnnnnnnnnnnnnnnnnnnnnnnnnnnnnnnnnnnnnnnnnnnnnnnnnnnnnnnnnnnnnnnnnnnnnnnnnnnnnnnnnnnnnnnnnnnnnnnnnnnnnnnnnnnnnnnnnnnnnnnnnnnnnnnnnnnnnnnnnnnnnnnnnnnnnnnnnnnnnnnnnnnnnnnnnnnnnnnnnnnnnnnnnnnnnnnnnnnnnnnnnnnnnnnnnnnnnnnnnnnnnnnnnnnnnnnnnnnnnnnnnnnnnnnnnnnnnnnnnnnnnnnnnnnnnnnnnnnnnnnnnnnnnnnnnnnnnnnnnnnnnnnnnnnnnnnnnnnnnnnnnnnnnnnnnnnnnnnnnnnnnnnnnnnnnnnnnnnnnnnnnnnnnnnnnnnnnnnnnnnnnnnnnnnnnnnnnnnnnnnnnnnnnnnnnnnnnnnnnnnnnnnnnnnnnnnnnnnnnnnnnnnnnnnnnnnnnnnnnnnnnnnnnnnnnnnnnnnnnnnnnnnnnnnnnnnnnnnnnnnnnnnnnnnnnnnnnnnnnnnnnnnnnnnnnnnnnnnnnnnnnnnnnnnnnnnnnnnnnnnnnnnnnnnnnnnnnnnnnnnnnnnnnnnnnnnnnnnnnnnnnnnnnnnnnnnnnnnnnnnnnnnnnnnnnnnnnnnnnnnnnnnnnnnnnnnnnnnnnnnnnnnnnnnnnnnnnnnnnnnnnnnnnnnnnnnnnnnnnnnnnnnnnnnnnnnnnnnnnnnnnnnnnnnnnnnnnnnnnnnnnnnnnnnnnnnnnnnnnnnnnnnnnnnnnnnnnnnnnnnnnnnnnnnnnnnnnnnnnnnnnnnnnnnnnnnnnnnnnnnnnnnnnnnnnnnnnnnnnnnnnnnnnnnnnnnnnnnnnnnnnnnnnnnnnnnnnnnnnnnnnnnnnnnnnnnnnnnnnnnnnnnnnnnnnnnnnnnnnnnnnnnnnnnnnnnnnnnnnnnnnnnnnnnnnnnnnnnnnnnnnnnnnnnnnnnnnnnnnnnnnnnnnnnnnnnnnnnnnnnnnnnnnnnnnnnnnnnnnnnnnnnnnnnnnnnnnnnnnnnnnnnnnnnnnnnnnnnnnnnnnnnnnnnnnnnnnnnnnnnnnnnnnnnnnnnnnnnnnnnnnnnnnnnnnnnnnnnnnnnnnnnnnnnnnnnnnnnnnnnnnnnnnnnnnnnnnnnnnnnnnnnnnnnnnnnnnnnnnnnnnnnnnnnnnnnnnnnnnnnnnnnnnnnnnnnnnnnnnnnnnnnnnnnnnnnnnnnnnnnnnnnnnnnnnnnnnnnnnnnnnnnnnnnnnnnnnnnnnnnnnnnnnnnnnnnnnnnnnnnnnnnnnnnnnnnnnnnnnnnnnnnnnnnnnnnnnnnnnnnnnnnnnnnnnnnnnnnnnnnnnnnnnnnnnnnnnnnnnnnnnnnnnnnnnnnnnnnnnnnnnnnnnnnnnnnnnnnnnnnnnnnnnnnnnnnnnnnnnnnnnnnnnnnnnnnnnnnnnnnnnnnnnnnnnnnnnnnnnnnnnnnnnnnnnnnnnnnnnnnnnnnnnnnnnnnnnnnnnnnnnnnnnnnnnnnnnnnnnnnnnnnnnnnnnnnnnnnnnnnnnnnnnnnnnnnnnnnnnnnnnnnnnnnnnnnnnnnnnnnnnnnnnnnnnnnnnnnnnnnnnnnnnnnnnnnnnnnnnnnnnnnnnnnnnnnnnnnnnnnnnnnnnnnnnnnnnnnnnnnnnnnnnnnnnnnnnnnnnnnnnnnnnnnnnnnnnnnnnnnnnnnnnnnnnnnnnnnnnnnnnnnnnnnnnnnnnnnnnnnnnnnnnnnnnnnnnnnnnnnnnnnnnnnnnnnnnnnnnnnnnnnnnnnnnnnnnnnnnnnnnnnnnnnnnnnnnnnnnnnnnnnnnnnnnnnnnnnnnnnnnnnnnnnnnnnnnnnnnnnnnnnnnnnnnnnnnnnnnnnnnnnnnnnnnnnnnnnnnnnnnnnnnnnnnnnnnnnnnnnnnnnnnnnnnnnnnnnnnnnnnnnnnnnnnnnnnnnnnnnnnnnnnnnnnnnnnnnnnnnnnnnnnnnnnnnnnnnnnnnnnnnnnnnnnnnnnnnnnnnnnnnnnnnnnnnnnnnnnnnnnnnnnnnnnnnnnnnnnnnnnnnnnnnnnnnnnnnnnnnnnnnnnnnnnnnnnnnnnnnnnnnnnnnnnnnnnnnnnnnnnnnnnnnnnnnnnnnnnnnnnnnnnnnnnnnnnnnnnnnnnnnnnnnnnnnnnnnnnnnnnnnnnnnnnnnnnnnnnnnnnnnnnnnnnnnnnnnnnnnnnnnnnnnnnnnnnnnnnnnnnnnnnnnnnnnnnnnnnnnnnnnnnnnnnnnnnnnnnnnnnnnnnnnnnnnnnnnnnnnnnnnnnnnnnnnnnnnnnnnnnnnnnnnnnnnnnnnnnnnnnnnnnnnnnnnnnnnnnnnnnnnnnnnnnnnnnnnnnnnnnnnnnnnnnnnnnnnnnnnnnnnnnnnnnnnnnnnnnnnnnnnnnnnnnnnnnnnnnnnnnnnnnnnnnnnnnnnnnnnnnnnnnnnnnnnnnnnnnnnnnnnnnnnnnnnnnnnnnnnnnnnnnnnnnnnnnnnnnnnnnnnnnnnnnnnnnnnnnnnnnnnnnnnnnnnnnnnnnnnnnnnnnnnnnnnnnnnnnnnnnnnnnnnnnnnnnnnnnnnnnnnnnnnnnnnnnnnnnnnnnnnnnnnnnnnnnnnnnnnnnnnnnnnnnnnnnnnnnnnnnnnnnnnnnnnnnnnnnnnnnnnnnnnnnnnnnnnnnnnnnnnnnnnnnnnnnnnnnnnnnnnnnnnnnnnnnnnnnnnnnnnnnnnnnnnnnnnnnnnnnnnnnnnnnnnnnnnnnnnnnnnnnnnnnnnnnnnnnnnnnnnnnnnnnnnnnnnnnnnnnnnnnnnnnnnnnnnnnnnnnnnnnnnnnnnnnnnnnnnnnnnnnnnnnnnnnnnnnnnnnnnnnnnnnnnnnnnnnnnnnnnnnnnnnnnnnnnnnnnnnnnnnnnnnnnnnnnnnnnnnnnnnnnnnnnnnnnnnnnnnnnnnnnnnnnnnnnnnnnnnnnnnnnnnnnnnnnnnnnnnnnnnnnnnnnnnnnnnnnnnnnnnnnnnnnnnnnnnnnnnnnnnnnnnnnnnnnnnnnnnnnnnnnnnnnnnnnnnnnnnnnnnnnnnnnnnnnnnnnnnnnnnnnnnnnnnnnnnnnnnnnnnnnnnnnnnnnnnnnnnnnnnnnnnnnnnnnnnnnnnnnnnnnnnnnnnnnnnnnnnnnnnnnnnnnnnnnnnnnnnnnnnnnnnnnnnnnnnnnnnnnnnnnnnnnnnnnnnnnnnnnnnnnnnnnnnnnnnnnnnnnnnnnnnnnnnnnnnnnnnnnnnnnnnnnnnnnnnnnnnnnnnnnnnnnnnnnnnnnnnnnnnnnnnnnnnnnnnnnnnnnnnnnnnnnnnnnnnnnnnnnnnnnnnnnnnnnnnnnnnnnnnnnnnnnnnnnnnnnnnnnnnnnnnnnnnnnnnnnnnnnnnnnnnnnnnnnnnnnnnnnnnnnnnnnnnnnnnnnnnnnnnnnnnnnnnnnnnnnnnnnnnnnnnnnnnnnnnnnnnnnnnnnnnnnnnnnnnnnnnnnnnnnnnnnnnnnnnnnnnnnnnnnnnnnnnnnnnnnnnnnnnnnnnnnnnnnnnnnnnnnnnnnnnnnnnnnnnnnnnnnnnnnnnnnnnnnnnnnnnnnnnnnnnnnnnnnnnnnnnnnnnnnnnnnnnnnnnnnnnnnnnnnnnnnnnnnnnnnnnnnnnnnnnnnnnnnnnnnnnnnnnnnnnnnnnnnnnnnnnnnnnnnnnnnnnnnnnnnnnnnnnnnnnnnnnnnnnnnnnnnnnnnnnnnnnnnnnnnnnnnnnnnnnnnnnnnnnnnnnnnnnnnnnnnnnnnnnnnnnnnnnnnnnnnnnnnnnnnnnnnnnnnnnnnnnnnnnnnnnnnnnnnnnnnnnnnnnnnnnnnnnnnnnnnnnnnnnnnnnnnnnnnnnnnnnnnnnnnnnnnnnnnnnnnnnnnnnnnnnnnnnnnnnnnnnnnnnnnnnnnnnnnnnnnnnnnnnnnnnnnnnnnnnnnnnnnnnnnnnnnnnnnnnnnnnnnnnnnnnnnnnnnnnnnnnnnnnnnnnnnnnnnnnnnnnnnnnnnnnnnnnnnnnnnnnnnnnnnnnnnnnnnnnnnnnnnnnnnnnnnnnnnnnnnnnnnnnnnnnnnnnnnnnnnnnnnnnnnnnnnnnnnnnnnnnnnnnnnnnnnnnnnnnnnnnnnnnnnnnnnnnnnnnnnnnnnnnnnnnnnnnnnnnnnnnnnnnnnnnnnnnnnnnnnnnnnnnnnnnnnnnnnnnnnnnnnnnnnnnnnnnnnnnnnnnnnnnnnnnnnnnnnnnnnnnnnnnnnnnnnnnnnnnnnnnnnnnnnnnnnnnnnnnnnnnnnnnnnnnnnnnnnnnnnnnnnnnnnnnnnnnnnnnnnnnnnnnnnnnnnnnnnnnnnnnnnnnnnnnnnnnnnnnnnnnnnnnnnnnnnnnnnnnnnnnnnnnnnnnnnnnnnnnnnnnnnnnnnnnnnnnnnnnnnnnnnnnnnnnnnnnnnnnnnnnnnnnnnnnnnnnnnnnnnnnnnnnnnnnnnnnnnnnnnnnnnnnnnnnnnnnnnnnnnnnnnnnnnnnnnnnnnnnnnnnnnnnnnnnnnnnnnnnnnnnnnnnnnnnnnnnnnnnnnnnnnnnnnnnnnnnnnnnnnnnnnnnnnnnnnnnnnnnnnnnnnnnnnnnnnnnnnnnnnnnnnnnnnnnnnnnnnnnnnnnnnnnnnnnnnnnnnnnnnnnnnnnnnnnnnnnnnnnnnnnnnnnnnnnnnnnnnnnnnnnnnnnnnnnnnnnnnnnnnnnnnnnnnnnnnnnnnnnnnnnnnnnnnnnnnnnnnnnnnnnnnnnnnnnnnnnnnnnnnnnnnnnnnnnnnnnnnnnnnnnnnnnnnnnnnnnnnnnnnnnnnnnnnnnnnnnnnnnnnnnnnnnnnnnnnnnnnnnnnnnnnnnnnnnnnnnnnnnnnnnnnnnnnnnnnnnnnnnnnnnnnnnnnnnnnnnnnnnnnnnnnnnnnnnnnnnnnnnnnnnnnnnnnnnnnnnnnnnnnnnnnnnnnnnnnnnnnnnnnnnnnnnnnnnnnnnnnnnnnnnnnnnnnnnnnnnnnnnnnnnnnnnnnnnnnnnnnnnnnnnnnnnnnnnnnnnnnnnnnnnnnnnnnnnnnnnnnnnnnnnnnnnnnnnnnnnnnnnnnnnnnnnnnnnnnnnnnnnnnnnnnnnnnnnnnnnnnnnnnnnnnnnnnnnnnnnnnnnnnnnnnnnnnnnnnnnnnnnnnnnnnnnnnnnnnnnnnnnnnnnnnnnnnnnnnnnnnnnnnnnnnnnnnnnnnnnnnnnnnnnnnnnnnnnnnnnnnnnnnnnnnnnnnnnnnnnnnnnnnnnnnnnnnnnnnnnnnnnnnnnnnnnnnnnnnnnnnnnnnnnnnnnnnnnnnnnnnnnnnnnnnnnnnnnnnnnnnnnnnnnnnnnnnnnnnnnnnnnnnnnnnnnnnnnnnnnnnnnnnnnnnnnnnnnnnnnnnnnnnnnnnnnnnnnnnnnnnnnnnnnnnnnnnnnnnnnnnnnnnnnnnnnnnnnnnnnnnnnnnnnnnnnnnnnnnnnnnnnnnnnnnnnnnnnnnnnnnnnnnnnnnnnnnnnnnnnnnnnnnnnnnnnnnnnnnnnnnnnnnnnnnnnnnnnnnnnnnnnnnnnnnnnnnnnnnnnnnnnnnnnnnnnnnnnnnnnnnnnnnnnnnnnnnnnnnnnnnnnnnnnnnnnnnnnnnnnnnnnnnnnnnnnnnnnnnnnnnnnnnnnnnnnnnnnnnnnnnnnnnnnnnnnnnnnnnnnnnnnnnnnnnnnnnnnnnnnnnnnnnnnnnnnnnnnnnnnnnnnnnnnnnnnnnnnnnnnnnnnnnnnnnnnnnnnnnnnnnnnnnnnnnnnnnnnnnnnnnnnnnnnnnnnnnnnnnnnnnnnnnnnnnnnnnnnnnnnnnnnnnnnnnnnnnnnnnnnnnnnnnnnnnnnnnnnnnnnnnnnnnnnnnnnnnnnnnnnnnnnnnnnnnnnnnnnnnnnnnnnnnnnnnnnnnnnnnnnnnnnnnnnnnnnnnnnnnnnnnnnnnnnnnnnnnnnnnnnnnnnnnnnnnnnnnnnnnnnnnnnnnnnnnnnnnnnnnnnnnnnnnnnnnnnnnnnnnnnnnnnnnnnnnnnnnnnnnnnnnnnnnnnnnnnnnnnnnnnnnnnnnnnnnnnnnnnnnnnnnnnnnnnnnnnnnnnnnnnnnnnnnnnnnnnnnnnnnnnnnnnnnnnnnnnnnnnnnnnnnnnnnnnnnnnnnnnnnnnnnnnnnnnnnnnnnnnnnnnnnnnnnnnnnnnnnnnnnnnnnnnnnnnnnnnnnnnnnnnnnnnnnnnnnnnnnnnnnnnnnnnnnnnnnnnnnnnnnnnnnnnnnnnnnnnnnnnnnnnnnnnnnnnnnnnnnnnnnnnnnnnnnnnnnnnnnnnnnnnnnnnnnnnnnnnnnnnnnnnnnnnnnnnnnnnnnnnnnnnnnnnnnnnnnnnnnnnnnnnnnnnnnnnnnnnnnnnnnnnnnnnnnnnnnnnnnnnnnnnnnnnnnnnnnnnnnnnnnnnnnnnnnnnnnnnnnnnnnnnnnnnnnnnnnnnnnnnnnnnnnnnnnnnnnnnnnnnnnnnnnnnnnnnnnnnnnnnnnnnnnnnnnnnnnnnnnnnnnnnnnnnnnnnnnnnnnnnnnnnnnnnnnnnnnnnnnnnnnnnnnnnnnnnnnnnnnnnnnnnnnnnnnnnnnnnnnnnnnnnnnnnnnnnnnnnnnnnnnnnnnnnnnnnnnnnnnnnnnnnnnnnnnnnnnnnnnnnnnnnnnnnnnnnnnnnnnnnnnnnnnnnnnnnnnnnnnnnnnnnnnnnnnnnnnnnnnnnnnnnnnnnnnnnnnnnnnnnnnnnnnnnnnnnnnnnnnnnnnnnnnnnnnnnnnnnnnnnnnnnnnnnnnnnnnnnnnnnnnnnnnnnnnnnnnnnnnnnnnnnnnnnnnnnnnnnnnnnnnnnnnnnnnnnnnnnnnnnnnnnnnnnnnnnnnnnnnnnnnnnnnnnnnnnnnnnnnnnnnnnnnnnnnnnnnnnnnnnnnnnnnnnnnnnnnnnnnnnnnnnnnnnnnnnnnnnnnnnnnnnnnnnnnnnnnnnnnnnnnnnnnnnnnnnnnnnnnnnnnnnnnnnnnnnnnnnnnnnnnnnnnnnnnnnnnnnnnnnnnnnnnnnnnnnnnnnnnnnnnnnnnnnnnnnnnnnnnnnnnnnnnnnnnnnnnnnnnnnnnnnnnnnnnnnnnnnnnnnnnnnnnnnnnnnnnnnnnnnnnnnnnnnnnnnnnnnnnnnnnnnnnnnnnnnnnnnnnnnnnnnnnnnnnnnnnnnnnnnnnnnnnnnnnnnnnnnnnnnnnnnnnnnnnnnnnnnnnnnnnnnnnnnnnnnnnnnnnnnnnnnnnnnnnnnnnnnnnnnnnnnnnnnnnnnnnnnnnnnnnnnnnnnnnnnnnnnnnnnnnnnnnnnnnnnnnnnnnnnnnnnnnnnnnnnnnnnnnnnnnnnnnnnnnnnnnnnnnnnnnnnnnnnnnnnnnnnnnnnnnnnnnnnnnnnnnnnnnnnnnnnnnnnnnnnnnnnnnnnnnnnnnnnnnnnnnnnnnnnnnnnnnnnnnnnnnnnnnnnnnnnnnnnnnnnnnnnnnnnnnnnnnnnnnnnnnnnnnnnnnnnnnnnnnnnnnnnnnnnnnnnnnnnnnnnnnnnnnnnnnnnnnnnnnnnnnnnnnnnnnnnnnnnnnnnnnnnnnnnnnnnnnnnnnnnnnnnnnnnnnnnnnnnnnnnnnnnnnnnnnnnnnnnnnnnnnnnnnnnnnnnnnnnnnnnnnnnnnnnnnnnnnnnnnnnnnnnnnnnnnnnnnnnnnnnnnnnnnnnnnnnnnnnnnnnnnnnnnnnnnnnnnnnnnnnnnnnnnnnnnnnnnnnnnnnnnnnnnnnnnnnnnnnnnnnnnnnnnnnnnnnnnnnnnnnnnnnnnnnnnnnnnnnnnnnnnnnnnnnnnnnnnnnnnnnnnnnnnnnnnnnnnnnnnnnnnnnnnnnnnnnnnnnnnnnnnnnnnnnnnnnnnnnnnnnnnnnnnnnnnnnnnnnnnnnnnnnnnnnnnnnnnnnnnnnnnnnnnnnnnnnnnnnnnnnnnnnnnnnnnnnnnnnnnnnnnnnnnnnnnnnnnnnnnnnnnnnnnnnnnnnnnnnnnnnnnnnnnnnnnnnnnnnnnnnnnnnnnnnnnnnnnnnnnnnnnnnnnnnnnnnnnnnnnnnnnnnnnnnnnnnnnnnnnnnnnnnnnnnnnnnnnnnnnnnnnnnnnnnnnnnnnnnnnnnnnnnnnnnnnnnnnnnnnnnnnnnnnnnnnnnnnnnnnnnnnnnnnnnnnnnnnnnnnnnnnnnnnnnnnnnnnnnnnnnnnnnnnnnnnnnnnnnnnnnnnnnnnnnnnnnnnnnnnnnnnnnnnnnnnnnnnnnnnnnnnnnnnnnnnnnnnnnnnnnnnnnnnnnnnnnnnnnnnnnnnnnnnnnnnnnnnnnnnnnnnnnnnnnnnnnnnnnnnnnnnnnnnnnnnnnnnnnnnnnnnnnnnnnnnnnnnnnnnnnnnnnnnnnnnnnnnnnnnnnnnnnnnnnnnnnnnnnnnnnnnnnnnnnnnnnnnnnnnnnnnnnnnnnnnnnnnnnnnnnnnnnnnnnnnnnnnnnnnnnnnnnnnnnnnnnnnnnnnnnnnnnnnnnnnnnnnnnnnnnnnnnnnnnnnnnnnnnnnnnnnnnnnnnnnnnnnnnnnnnnnnnnnnnnnnnnnnnnnnnnnnnnnnnnnnnnnnnnnnnnnnnnnnnnnnnnnnnnnnnnnnnnnnnnnnnnnnnnnnnnnnnnnnnnnnnnnnnnnnnnnnnnnnnnnnnnnnnnnnnnnnnnnnnnnnnnnnnnnnnnnnnnnnnnnnnnnnnnnnnnnnnnnnnnnnnnnnnnnnnnnnnnnnnnnnnnnnnnnnnnnnnnnnnnnnnnnnnnnnnnnnnnnnnnnnnnnnnnnnnnnnnnnnnnnnnnnnnnnnnnnnnnnnnnnnnnnnnnnnnnnnnnnnnnnnnnnnnnnnnnnnnnnnnnnnnnnnnnnnnnnnnnnnnnnnnnnnnnnnnnnnnnnnnnnnnnnnnnnnnnnnnnnnnnnnnnnnnnnnnnnnnnnnnnnnnnnnnnnnnnnnnnnnnnnnnnnnnnnnnnnnnnnnnnnnnnnnnnnnnnnnnnnnnnnnnnnnnnnnnnnnnnnnnnnnnnnnnnnnnnnnnnnnnnnnnnnnnnnnnnnnnnnnnnnnnnnnnnnnnnnnnnnnnnnnnnnnnnnnnnnnnnnnnnnnnnnnnnnnnnnnnnnnnnnnnnnnnnnnnnnnnnnnnnnnnnnnnnnnnnnnnnnnnnnnnnnnnnnnnnnnnnnnnnnnnnnnnnnnnnnnnnnnnnnnnnnnnnnnnnnnnnnnnnnnnnnnnnnnnnnnnnnnnnnnnnnnnnnnnnnnnnnnnnnnnnnnnnnnnnnnnnnnnnnnnnnnnnnnnnnnnnnnnnnnnnnnnnnnnnnnnnnnnnnnnnnnnnnnnnnnnnnnnnnnnnnnnnnnnnnnnnnnnnnnnnnnnnnnnnnnnnnnnnnnnnnnnnnnnnnnnnnnnnnnnnnnnnnnnnnnnnnnnnnnnnnnnnnnnnnnnnnnnnnnnnnnnnnnnnnnnnnnnnnnnnnnnnnnnnnnnnnnnnnnnnnnnnnnnnnnnnnnnnnnnnnnnnnnnnnnnnnnnnnnnnnnnnnnnnnnnnnnnnnnnnnnnnnnnnnnnnnnnnnnnnnnnnnnnnnnnnnnnnnnnnnnnnnnnnnnnnnnnnnnnnnnnnnnnnnnnnnnnnnnnnnnnnnnnnnnnnnnnnnnnnnnnnnnnnnnnnnnnnnnnnnnnnnnnnnnnnnnnnnnnnnnnnnnnnnnnnnnnnnnnnnnnnnnnnnnnnnnnnnnnnnnnnnnnnnnnnnnnnnnnnnnnnnnnnnnnnnnnnnnnnnnnnnnnnnnnnnnnnnnnnnnnnnnnnnnnnnnnnnnnnnnnnnnnnnnnnnnnnnnnnnnnnnnnnnnnnnnnnnnnnnnnnnnnnnnnnnnnnnnnnnnnnnnnnnnnnnnnnnnnnnnnnnnnnnnnnnnnnnnnnnnnnnnnnnnnnnnnnnnnnnnnnnnnnnnnnnnnnnnnnnnnnnnnnnnnnnnnnnnnnnnnnnnnnnnnnnnnnnnnnnnnnnnnnnnnnnnnnnnnnnnnnnnnnnnnnnnnnnnnnnnnnnnnnnnnnnnnnnnnnnnnnnnnnnnnnnnnnnnnnnnnnnnnnnnnnnnnnnnnnnnnnnnnnnnnnnnnnnnnnnnnnnnnnnnnnnnnnnnnnnnnnnnnnnnnnnnnnnnnnnnnnnnnnnnnnnnnnnnnnnnnnnnnnnnnnnnnnnnnnnnnnnnnnnnnnnnnnnnnnnnnnnnnnnnnnnnnnnnnnnnnnnnnnnnnnnnnnnnnnnnnnnnnnnnnnnnnnnnnnnnnnnnnnnnnnnnnnnnnnnnnnnnnnnnnnnnnnnnnnnnnnnnnnnnnnnnnnnnnnnnnnnnnnnnnnnnnnnnnnnnnnnnnnnnnnnnnnnnnnnnnnnnnnnnnnnnnnnnnnnnnnnnnnnnnnnnnnnnnnnnnnnnnnnnnnnnnnnnnnnnnnnnnnnnnnnnnnnnnnnnnnnnnnnnnnnnnnnnnnnnnnnnnnnnnnnnnnnnnnnnnnnnnnnnnnnnnnnnnnnnnnnnnnnnnnnnnnnnnnnnnnnnnnnnnnnnnnnnnnnnnnnnnnnnnnnnnnnnnnnnnnnnnnnnnnnnnnnnnnnnnnnnnnnnnnnnnnnnnnnnnnnnnnnnnnnnnnnnnnnnnnnnnnnnnnnnnnnnnnnnnnnnnnnnnnnnnnnnnnnnnnnnnnnnnnnnnnnnnnnnnnnnnnnnnnnnnnnnnnnnnnnnnnnnnnnnnnnnnnnnnnnnnnnnnnnnnnnnnnnnnnnnnnnnnnnnnnnnnnnnnnnnnnnnnnnnnnnnnnnnnnnnnnnnnnnnnnnnnnnnnnnnnnnnnnnnnnnnnnnnnnnnnnnnnnnnnnnnnnnnnnnnnnnnnnnnnnnnnnnnnnnnnnnnnnnnnnnnnnnnnnnnnnnnnnnnnnnnnnnnnnnnnnnnnnnnnnnnnnnnnnnnnnnnnnnnnnnnnnnnnnnnnnnnnnnnnnnnnnnnnnnnnnnnnnnnnnnnnnnnnnnnnnnnnnnnnnnnnnnnnnnnnnnnnnnnnnnnnnnnnnnnnnnnnnnnnnnnnnnnnnnnnnnnnnnnnnnnnnnnnnnnnnnnnnnnnnnnnnnnnnnnnnnnnnnnnnnnnnnnnnnnnnnnnnnnnnnnnnnnnnnnnnnnnnnnnnnnnnnnnnnnnnnnnnnnnnnnnnnnnnnnnnnnnnnnnnnnnnnnnnnnnnnnnnnnnnnnnnnnnnnnnnnnnnnnnnnnnnnnnnnnnnnnnnnnnnnnnnnnnnnnnnnnnnnnnnnnnnnnnnnnnnnnnnnnnnnnnnnnnnnnnnnnnnnnnnnnnnnnnnnnnnnnnnnnnnnnnnnnnnnnnnnnnnnnnnnnnnnnnnnnnnnnnnnnnnnnnnnnnnnnnnnnnnnnnnnnnnnnnnnnnnnnnnnnnnnnnnnnnnnnnnnnnnnnnnnnnnnnnnnnnnnnnnnnnnnnnnnnnnnnnnnnnnnnnnnnnnnnnnnnnnnnnnnnnnnnnnnnnnnnnnnnnnnnnnnnnnnnnnnnnnnnnnnnnnnnnnnnnnnnnnnnnnnnnnnnnnnnnnnnnnnnnnnnnnnnnnnnnnnnnnnnnnnnnnnnnnnnnnnnnnnnnnnnnnnnnnnnnnnnnnnnnnnnnnnnnnnnnnnnnnnnnnnnnnnnnnnnnnnnnnnnnnnnnnnnnnnnnnnnnnnnnnnnnnnnnnnnnnnnnnnnnnnnnnnnnnnnnnnnnnnnnnnnnnnnnnnnnnnnnnnnnnnnnnnnnnnnnnnnnnnnnnnnnnnnnnnnnnnnnnnnnnnnnnnnnnnnnnnnnnnnnnnnnnnnnnnnnnnnnnnnnnnnnnnnnnnnnnnnnnnnnnnnnnnnnnnnnnnnnnnnnnnnnnnnnnnnnnnnnnnnnnnnnnnnnnnnnnnnnnnnnnnnnnnnnnnnnnnnnnnnnnnnnnnnnnnnnnnnnnnnnnnnnnnnnnnnnnnnnnnnnnnnnnnnnnnnnnnnnnnnnnnnnnnnnnnnnnnnnnnnnnnnnnnnnnnnnnnnnnnnnnnnnnnnnnnnnnnnnnnnnnnnnnnnnnnnnnnnnnnnnnnnnnnnnnnnnnnnnnnnnnnnnnnnnnnnnnnnnnnnnnnnnnnnnnnnnnnnnnnnnnnnnnnnnnnnnnnnnnnnnnnnnnnnnnnnnnnnnnnnnnnnnnnnnnnnnnnnnnnnnnnnnnnnnnnnnnnnnnnnnnnnnnnnnnnnnnnnnnnnnnnnnnnnnnnnnnnnnnnnnnnnnnnnnnnnnnnnnnnnnnnnnnnnnnnnnnnnnnnnnnnnnnnnnnnnnnnnnnnnnnnnnnnnnnnnnnnnnnnnnnnnnnnnnnnnnnnnnnnnnnnnnnnnnnnnnnnnnnnnnnnnnnnnnnnnnnnnnnnnnnnnnnnnnnnnnnnnnnnnnnnnnnnnnnnnnnnnnnnnnnnnnnnnnnnnnnnnnnnnnnnnnnnnnnnnnnnnnnnnnnnnnnnnnnnnnnnnnnnnnnnnnnnnnnnnnnnnnnnnnnnnnnnnnnnnnnnnnnnnnnnnnnnnnnnnnnnnnnnnnnnnnnnnnnnnnnnnnnnnnnnnnnnnnnnnnnnnnnnnnnnnnnnnnnnnnnnnnnnnnnnnnnnnnnnnnnnnnnnnnnnnnnnnnnnnnnnnnnnnnnnnnnnnnnnnnnnnnnnnnnnnnnnnnnnnnnnnnnnnnnnnnnnnnnnnnnnnnnnnnnnnnnnnnnnnnnnnnnnnnnnnnnnnnnnnnnnnnnnnnnnnnnnnnnnnnnnnnnnnnnnnnnnnnnnnnnnnnnnnnnnnnnnnnnnnnnnnnnnnnnnnnnnnnnnnnnnnnnnnnnnnnnnnnnnnnnnnnnnnnnnnnnnnnnnnnnnnnnnnnnnnnnnnnnnnnnnnnnnnnnnnnnnnnnnnnnnnnnnnnnnnnnnnnnnnnnnnnnnnnnnnnnnnnnnnnnnnnnnnnnnnnnnnnnnnnnnnnnnnnnnnnnnnnnnnnnnnnnnnnnnnnnnnnnnnnnnnnnnnnnnnnnnnnnnnnnnnnnnnnnnnnnnnnnnnnnnnnnnnnnnnnnnnnnnnnnnnnnnnnnnnnnnnnnnnnnnnnnnnnnnnnnnnnnnnnnnnnnnnnnnnnnnnnnnnnnnnnnnnnnnnnnnnnnnnnnnnnnnnnnnnnnnnnnnnnnnnnnnnnnnnnnnnnnnnnnnnnnnnnnnnnnnnnnnnnnnnnnnnnnnnnnnnnnnnnnnnnnnnnnnnnnnnnnnnnnnnnnnnnnnnnnnnnnnnnnnnnnnnnnnnnnnnnnnnnnnnnnnnnnnnnnnnnnnnnnnnnnnnnnnnnnnnnnnnnnnnnnnnnnnnnnnnnnnnnnnnnnnnnnnnnnnnnnnnnnnnnnnnnnnnnnnnnnnnnnnnnnnnnnnnnnnnnnnnnnnnnnnnnnnnnnnnnnnnnnnnnnnnnnnnnnnnnnnnnnnnnnnnnnnnnnnnnnnnnnnnnnnnnnnnnnnnnnnnnnnnnnnnnnnnnnnnnnnnnnnnnnnnnnnnnnnnnnnnnnnnnnnnnnnnnnnnnnnnnnnnnnnnnnnnnnnnnnnnnnnnnnnnnnnnnnnnnnnnnnnnnnnnnnnnnnnnnnnnnnnnnnnnnnnnnnnnnnnnnnnnnnnnnnnnnnnnnnnnnnnnnnnnnnnnnnnnnnnnnnnnnnnnnnnnnnnnnnnnnnnnnnnnnnnnnnnnnnnnnnnnnnnnnnnnnnnnnnnnnnnnnnnnnnnnnnnnnnnnnnnnnnnnnnnnnnnnnnnnnnnnnnnnnnnnnnnnnnnnnnnnnnnnnnnnnnnnnnnnnnnnnnnnnnnnnnnnnnnnnnnnnnnnnnnnnnnnnnnnnnnnnnnnnnnnnnnnnnnnnnnnnnnnnnnnnnnnnnnnnnnnnnnnnnnnnnnnnnnnnnnnnnnnnnnnnnnnnnnnnnnnnnnnnnnnnnnnnnnnnnnnnnnnnnnnnnnnnnnnnnnnnnnnnnnnnnnnnnnnnnnnnnnnnnnnnnnnnnnnnnnnnnnnnnnnnnnnnnnnnnnnnnnnnnnnnnnnnnnnnnnnnnnnnnnnnnnnnnnnnnnnnnnnnnnnnnnnnnnnnnnnnnnnnnnnnnnnnnnnnnnnnnnnnnnnnnnnnnnnnnnnnnnnnnnnnnnnnnnnnnnnnnnnnnnnnnnnnnnnnnnnnnnnnnnnnnnnnnnnnnnnnnnnnnnnnnnnnnnnnnnnnnnnnnnnnnnnnnnnnnnnnnnnnnnnnnnnnnnnnnnnnnnnnnnnnnnnnnnnnnnnnnnnnnnnnnnnnnnnnnnnnnnnnnnnnnnnnnnnnnnnnnnnnnnnnnnnnnnnnnnnnnnnnnnnnnnnnnnnnnnnnnnnnnnnnnnnnnnnnnnnnnnnnnnnnnnnnnnnnnnnnnnnnnnnnnnnnnnnnnnnnnnnnnnnnnnnnnnnnnnnnnnnnnnnnnnnnnnnnnnnnnnnnnnnnnnnnnnnnnnnnnnnnnnnnnnnnnnnnnnnnnnnnnnnnnnnnnnnnnnnnnnnnnnnnnnnnnnnnnnnnnnnnnnnnnnnnnnnnnnnnnnnnnnnnnnnnnnnnnnnnnnnnnnnnnnnnnnnnnnnnnnnnnnnnnnnnnnnnnnnnnnnnnnnnnnnnnnnnnnnnnnnnnnnnnnnnnnnnnnnnnnnnnnnnnnnnnnnnnnnnnnnnnnnnnnnnnnnnnnnnnnnnnnnnnnnnnnnnnnnnnnnnnnnnnnnnnnnnnnnnnnnnnnnnnnnnnnnnnnnnnnnnnnnnnnnnnnnnnnnnnnnnnnnnnnnnnnnnnnnnnnnnnnnnnnnnnnnnnnnnnnnnnnnnnnnnnnnnnnnnnnnnnnnnnnnnnnnnnnnnnnnnnnnnnnnnnnnnnnnnnnnnnnnnnnnnnnnnnnnnnnnnnnnnnnnnnnnnnnnnnnnnnnnnnnnnnnnnnnnnnnnnnnnnnnnnnnnnnnnnnnnnnnnnnnnnnnnnnnnnnnnnnnnnnnnnnnnnnnnnnnnnnnnnnnnnnnnnnnnnnnnnnnnnnnnnnnnnnnnnnnnnnnnnnnnnnnnnnnnnnnnnnnnnnnnnnnnnnnnnnnnnnnnnnnnnnnnnnnnnnnnnnnnnnnnnnnnnnnnnnnnnnnnnnnnnnnnnnnnnnnnnnnnnnnnnnnnnnnnnnnnnnnnnnnnnnnnnnnnnnnnnnnnnnnnnnnnnnnnnnnnnnnnnnnnnnnnnnnnnnnnnnnnnnnnnnnnnnnnnnnnnnnnnnnnnnnnnnnnnnnnnnnnnnnnnnnnnnnnnnnnnnnnnnnnnnnnnnnnnnnnnnnnnnnnnnnnnnnnnnnnnnnnnnnnnnnnnnnnnnnnnnnnnnnnnnnnnnnnnnnnnnnnnnnnnnnnnnnnnnnnnnnnnnnnnnnnnnnnnnnnnnnnnnnnnnnnnnnnnnnnnnnnnnnnnnnnnnnnnnnnnnnnnnnnnnnnnnnnnnnnnnnnnnnnnnnnnnnnnnnnnnnnnnnnnnnnnnnnnnnnnnnnnnnnnnnnnnnnnnnnnnnnnnnnnnnnnnnnnnnnnnnnnnnnnnnnnnnnnnnnnnnnnnnnnnnnnnnnnnnnnnnnnnnnnnnnnnnnnnnnnnnnnnnnnnnnnnnnnnnnnnnnnnnnnnnnnnnnnnnnnnnnnnnnnnnnnnnnnnnnnnnnnnnnnnnnnnnnnnnnnnnnnnnnnnnnnnnnnnnnnnnnnnnnnnnnnnnnnnnnnnnnnnnnnnnnnnnnnnnnnnnnnnnnnnnnnnnnnnnnnnnnnnnnnnnnnnnnnnnnnnnnnnnnnnnnnnnnnnnnnnnnnnnnnnnnnnnnnnnnnnnnnnnnnnnnnnnnnnnnnnnnnnnnnnnnnnnnnnnnnnnnnnnnnnnnnnnnnnnnnnnnnnnnnnnnnnnnnnnnnnnnnnnnnnnnnnnnnnnnnnnnnnnnnnnnnnnnnnnnnnnnnnnnnnnnnnnnnnnnnnnnnnnnnnnnnnnnnnnnnnnnnnnnnnnnnnnnnnnnnnnnnnnnnnnnnnnnnnnnnnnnnnnnnnnnnnnnnnnnnnnnnnnnnnnnnnnnnnnnnnnnnnnnnnnnnnnnnnnnnnnnnnnnnnnnnnnnnnnnnnnnnnnnnnnnnnnnnnnnnnnnnnnnnnnnnnnnnnnnnnnnnnnnnnnnnnnnnnnnnnnnnnnnnnnnnnnnnnnnnnnnnnnnnnnnnnnnnnnnnnnnnnnnnnnnnnnnnnnnnnnnnnnnnnnnnnnnnnnnnnnnnnnnnnnnnnnnnnnnnnnnnnnnnnnnnnnnnnnnnnnnnnnnnnnnnnnnnnnnnnnnnnnnnnnnnnnnnnnnnnnnnnnnnnnnnnnnnnnnnnnnnnnnnnnnnnnnnnnnnnnnnnnnnnnnnnnnnnnnnnnnnnnnnnnnnnnnnnnnnnnnnnnnnnnnnnnnnnnnnnnnnnnnnnnnnnnnnnnnnnnnnnnnnnnnnnnnnnnnnnnnnnnnnnnnnnnnnnnnnnnnnnnnnnnnnnnnnnnnnnnnnnnnnnnnnnnnnnnnnnnnnnnnnnnnnnnnnnnnnnnnnnnnnnnnnnnnnnnnnnnnnnnnnnnnnnnnnnnnnnnnnnnnnnnnnnnnnnnnnnnnnnnnnnnnnnnnnnnnnnnnnnnnnnnnnnnnnnnnnnnnnnnnnnnnnnnnnnnnnnnnnnnnnnnnnnnnnnnnnnnnnnnnnnnnnnnnnnnnnnnnnnnnnnnnnnnnnnnnnnnnnnnnnnnnnnnnnnnnnnnnnnnnnnnnnnnnnnnnnnnnnnnnnnnnnnnnnnnnnnnnnnnnnnnnnnnnnnnnnnnnnnnnnnnnnnnnnnnnnnnnnnnnnnnnnnnnnnnnnnnnnnnnnnnnnnnnnnnnnnnnnnnnnnnnnnnnnnnnnnnnnnnnnnnnnnnnnnnnnnnnnnnnnnnnnnnnnnnnnnnnnnnnnnnnnnnnnnnnnnnnnnnnnnnnnnnnnnnnnnnnnnnnnnnnnnnnnnnnnnnnnnnnnnnnnnnnnnnnnnnnnnnnnnnnnnnnnnnnnnnnnnnnnnnnnnnnnnnnnnnnnnnnnnnnnnnnnnnnnnnnnnnnnnnnnnnnnnnnnnnnnnnnnnnnnnnnnnnnnnnnnnnnnnnnnnnnnnnnnnnnnnnnnnnnnnnnnnnnnnnnnnnnnnnnnnnnnnnnnnnnnnnnnnnnnnnnnnnnnnnnnnnnnnnnnnnnnnnnnnnnnnnnnnnnnnnnnnnnnnnnnnnnnnnnnnnnnnnnnnnnnnnnnnnnnnnnnnnnnnnnnnnnnnnnnnnnnnnnnnnnnnnnnnnnnnnnnnnnnnnnnnnnnnnnnnnnnnnnnnnnnnnnnnnnnnnnnnnnnnnnnnnnnnnnnnnnnnnnnnnnnnnnnnnnnnnnnnnnnnnnnnnnnnnnnnnnnnnnnnnnnnnnnnnnnnnnnnnnnnnnnnnnnnnnnnnnnnnnnnnnnnnnnnnnnnnnnnnnnnnnnnnnnnnnnnnnnnnnnnnnnnnnnnnnnnnnnnnnnnnnnnnnnnnnnnnnnnnnnnnnnnnnnnnnnnnnnnnnnnnnnnnnnnnnnnnnnnnnnnnnnnnnnnnnnnnnnnnnnnnnnnnnnnnnnnnnnnnnnnnnnnnnnnnnnnnnnnnnnnnnnnnnnnnnnnnnnnnnnnnnnnnnnnnnnnnnnnnnnnnnnnnnnnnnnnnnnnnnnnnnnnnnnnnnnnnnnnnnnnnnnnnnnnnnnnnnnnnnnnnnnnnnnnnnnnnnnnnnnnnnnnnnnnnnnnnnnnnnnnnnnnnnnnnnnnnnnnnnnnnnnnnnnnnnnnnnnnnnnnnnnnnnnnnnnnnnnnnnnnnnnnnnnnnnnnnnnnnnnnnnnnnnnnnnnnnnnnnnnnnnnnnnnnnnnnnnnnnnnnnnnnnnnnnnnnnnnnnnnnnnnnnnnnnnnnnnnnnnnnnnnnnnnnnnnnnnnnnnnnnnnnnnnnnnnnnnnnnnnnnnnnnnnnnnnnnnnnnnnnnnnnnnnnnnnnnnnnnnnnnnnnnnnnnnnnnnnnnnnnnnnnnnnnnnnnnnnnnnnnnnnnnnnnnnnnnnnnnnnnnnnnnnnnnnnnnnnnnnnnnnnnnnnnnnnnnnnnnnnnnnnnnnnnnnnnnnnnnnnnnnnnnnnnnnnnnnnnnnnnnnnnnnnnnnnnnnnnnnnnnnnnnnnnnnnnnnnnnnnnnnnnnnnnnnnnnnnnnnnnnnnnnnnnnnnnnnnnnnnnnnnnnnnnnnnnnnnnnnnnnnnnnnnnnnnnnnnnnnnnnnnnnnnnnnnnnnnnnnnnnnnnnnnnnnnnnnnnnnnnnnnnnnnnnnnnnnnnnnnnnnnnnnnnnnnnnnnnnnnnnnnnnnnnnnnnnnnnnnnnnnnnnnnnnnnnnnnnnnnnnnnnnnnnnnnnnnnnnnnnnnnnnnnnnnnnnnnnnnnnnnnnnnnnnnnnnnnnnnnnnnnnnnnnnnnnnnnnnnnnnnnnnnnnnnnnnnnnnnnnnnnnnnnnnnnnnnnnnnnnnnnnnnnnnnnnnnnnnnnnnnnnnnnnnnnnnnnnnnnnnnnnnnnnnnnnnnnnnnnnnnnnnnnnnnnnnnnnnnnnnnnnnnnnnnnnnnnnnnnnnnnnnnnnnnnnnnnnnnnnnnnnnnnnnnnnnnnnnnnnnnnnnnnnnnnnnnnnnnnnnnnnnnnnnnnnnnnnnnnnnnnnnnnnnnnnnnnnnnnnnnnnnnnnnnnnnnnnnnnnnnnnnnnnnnnnnnnnnnnnnnnnnnnnnnnnnnnnnnnnnnnnnnnnnnnnnnnnnnnnnnnnnnnnnnnnnnnnnnnnnnnnnnnnnnnnnnnnnnnnnnnnnnnnnnnnnnnnnnnnnnnnnnnnnnnnnnnnnnnnnnnnnnnnnnnnnnnnnnnnnnnnnnnnnnnnnnnnnnnnnnnnnnnnnnnnnnnnnnnnnnnnnnnnnnnnnnnnnnnnnnnnnnnnnnnnnnnnnnnnnnnnnnnnnnnnnnnnnnnnnnnnnnnnnnnnnnnnnnnnnnnnnnnnnnnnnnnnnnnnnnnnnnnnnnnnnnnnnnnnnnnnnnnnnnnnnnnnnnnnnnnnnnnnnnnnnnnnnnnnnnnnnnnnnnnnnnnnnnnnnnnnnnnnnnnnnnnnnnnnnnnnnnnnnnnnnnnnnnnnnnnnnnnnnnnnnnnnnnnnnnnnnnnnnnnnnnnnnnnnnnnnnnnnnnnnnnnnnnnnnnnnnnnnnnnnnnnnnnnnnnnnnnnnnnnnnnnnnnnnnnnnnnnnnnnnnnnnnnnnnnnnnnnnnnnnnnnnnnnnnnnnnnnnnnnnnnnnnnnnnnnnnnnnnnnnnnnnnnnnnnnnnnnnnnnnnnnnnnnnnnnnnnnnnnnnnnnnnnnnnnnnnnnnnnnnnnnnnnnnnnnnnnnnnnnnnnnnnnnnnnnnnnnnnnnnnnnnnnnnnnnnnnnnnnnnnnnnnnnnnnnnnnnnnnnnnnnnnnnnnnnnnnnnnnnnnnnnnnnnnnnnnnnnnnnnnnnnnnnnnnnnnnnnnnnnnnnnnnnnnnnnnnnnnnnnnnnnnnnnnnnnnnnnnnnnnnnnnnnnnnnnnnnnnnnnnnnnnnnnnnnnnnnnnnnnnnnnnnnnnnnnnnnnnnnnnnnnnnnnnnnnnnnnnnnnnnnnnnnnnnnnnnnnnnnnnnnnnnnnnnnnnnnnnnnnnnnnnnnnnnnnnnnnnnnnnnnnnnnnnnnnnnnnnnnnnnnnnnnnnnnnnnnnnnnnnnnnnnnnnnnnnnnnnnnnnnnnnnnnnnnnnnnnnnnnnnnnnnnnnnnnnnnnnnnnnnnnnnnnnnnnnnnnnnnnnnnnnnnnnnnnnnnnnnnnnnnnnnnnnnnnnnnnnnnnnnnnnnnnnnnnnnnnnnnnnnnnnnnnnnnnnnnnnnnnnnnnnnnnnnnnnnnnnnnnnnnnnnnnnnnnnnnnnnnnnnnnnnnnnnnnnnnnnnnnnnnnnnnnnnnnnnnnnnnnnnnnnnnnnnnnnnnnnnnnnnnnnnnnnnnnnnnnnnnnnnnnnnnnnnnnnnnnnnnnnnnnnnnnnnnnnnnnnnnnnnnnnnnnnnnnnnnnnnnnnnnnnnnnnnnnnnnnnnnnnnnnnnnnnnnnnnnnnnnnnnnnnnnnnnnnnnnnnnnnnnnnnnnnnnnnnnnnnnnnnnnnnnnnnnnnnnnnnnnnnnnnnnnnnnnnnnnnnnnnnnnnnnnnnnnnnnnnnnnnnnnnnnnnnnnnnnnnnnnnnnnnnnnnnnnnnnnnnnnnnnnnnnnnnnnnnnnnnnnnnnnnnnnnnnnnnnnnnnnnnnnnnnnnnnnnnnnnnnnnnnnnnnnnnnnnnnnnnnnnnnnnnnnnnnnnnnnnnnnnnnnnnnnnnnnnnnnnnnnnnnnnnnnnnnnnnnnnnnnnnnnnnnnnnnnnnnnnnnnnnnnnnnnnnnnnnnnnnnnnnnnnnnnnnnnnnnnnnnnnnnnnnnnnnnnnnnnnnnnnnnnnnnnnnnnnnnnnnnnnnnnnnnnnnnnnnnnnnnnnnnnnnnnnnnnnnnnnnnnnnnnnnnnnnnnnnnnnnnnnnnnnnnnnnnnnnnnnnnnnnnnnnnnnnnnnnnnnnnnnnnnnnnnnnnnnnnnnnnnnnnnnnnnnnnnnnnnnnnnnnnnnnnnnnnnnnnnnnnnnnnnnnnnnnnnnnnnnnnnnnnnnnnnnnnnnnnnnnnnnnnnnnnnnnnnnnnnnnnnnnnnnnnnnnnnnnnnnnnnnnnnnnnnnnnnnnnnnnnnnnnnnnnnnnnnnnnnnnnnnnnnnnnnnnnnnnnnnnnnnnnnnnnnnnnnnnnnnnnnnnnnnnnnnnnnnnnnnnnnnnnnnnnnnnnnnnnnnnnnnnnnnnnnnnnnnnnnnnnnnnnnnnnnnnnnnnnnnnnnnnnnnnnnnnnnnnnnnnnnnnnnnnnnnnnnnnnnnnnnnnnnnnnnnnnnnnnnnnnnnnnnnnnnnnnnnnnnnnnnnnnnnnnnnnnnnnnnnnnnnnnnnnnnnnnnnnnnnnnnnnnnnnnnnnnnnnnnnnnnnnnnnnnnnnnnnnnnnnnnnnnnnnnnnnnnnnnnnnnnnnnnnnnnnnnnnnnnnnnnnnnnnnnnnnnnnnnnnnnnnnnnnnnnnnnnnnnnnnnnnnnnnnnnnnnnnnnnnnnnnnnnnnnnnnnnnnnnnnnnnnnnnnnnnnnnnnnnnnnnnnnnnnnnnnnnnnnnnnnnnnnnnnnnnnnnnnnnnnnnnnnnnnnnnnnnnnnnnnnnnnnnnnnnnnnnnnnnnnnnnnnnnnnnnnnnnnnnnnnnnnnnnnnnnnnnnnnnnnnnnnnnnnnnnnnnnnnnnnnnnnnnnnnnnnnnnnnnnnnnnnnnnnnnnnnnnnnnnnnnnnnnnnnnnnnnnnnnnnnnnnnnnnnnnnnnnnnnnnnnnnnnnnnnnnnnnnnnnnnnnnnnnnnnnnnnnnnnnnnnnnnnnnnnnnnnnnnnnnnnnnnnnnnnnnnnnnnnnnnnnnnnnnnnnnnnnnnnnnnnnnnnnnnnnnnnnnnnnnnnnnnnnnnnnnnnnnnnnnnnnnnnnnnnnnnnnnnnnnnnnnnnnnnnnnnnnnnnnnnnnnnnnnnnnnnnnnnnnnnnnnnnnnnnnnnnnnnnnnnnnnnnnnnnnnnnnnnnnnnnnnnnnnnnnnnnnnnnnnnnnnnnnnnnnnnnnnnnnnnnnnnnnnnnnnnnnnnnnnnnnnnnnnnnnnnnnnnnnnnnnnnnnnnnnnnnnnnnnnnnnnnnnnnnnnnnnnnnnnnnnnnnnnnnnnnnnnnnnnnnnnnnnnnnnnnnnnnnnnnnnnnnnnnnnnnnnnnnnnnnnnnnnnnnnnnnnnnnnnnnnnnnnnnnnnnnnnnnnnnnnnnnnnnnnnnnnnnnnnnnnnnnnnnnnnnnnnnnnnnnnnnnnnnnnnnnnnnnnnnnnnnnnnnnnnnnnnnnnnnnnnnnnnnnnnnnnnnnnnnnnnnnnnnnnnnnnnnnnnnnnnnnnnnnnnnnnnnnnnnnnnnnnnnnnnnnnnnnnnnnnnnnnnnnnnnnnnnnnnnnnnnnnnnnnnnnnnnnnnnnnnnnnnnnnnnnnnnnnnnnnnnnnnnnnnnnnnnnnnnnnnnnnnnnnnnnnnnnnnnnnnnnnnnnnnnnnnnnnnnnnnnnnnnnnnnnnnnnnnnnnnnnnnnnnnnnnnnnnnnnnnnnnnnnnnnnnnnnnnnnnnnnnnnnnnnnnnnnnnnnnnnnnnnnnnnnnnnnnnnnnnnnnnnnnnnnnnnnnnnnnnnnnnnnnnnnnnnnnnnnnnnnnnnnnnnnnnnnnnnnnnnnnnnnnnnnnnnnnnnnnnnnnnnnnnnnnnnnnnnnnnnnnnnnnnnnnnnnnnnnnnnnnnnnnnnnnnnnnnnnnnnnnnnnnnnnnnnnnnnnnnnnnnnnnnnnnnnnnnnnnnnnnnnnnnnnnnnnnnnnnnnnnnnnnnnnnnnnnnnnnnnnnnnnnnnnnnnnnnnnnnnnnnnnnnnnnnnnnnnnnnnnnnnnnnnnnnnnnnnnnnnnnnnnnnnnnnnnnnnnnnnnnnnnnnnnnnnnnnnnnnnnnnnnnnnnnnnnnnnnnnnnnnnnnnnnnnnnnnnnnnnnnnnnnnnnnnnnnnnnnnnnnnnnnnnnnnnnnnnnnnnnnnnnnnnnnnnnnnnnnnnnnnnnnnnnnnnnnnnnnnnnnnnnnnnnnnnnnnnnnnnnnnnnnnnnnnnnnnnnnnnnnnnnnnnnnnnnnnnnnnnnnnnnnnnnnnnnnnnnnnnnnnnnnnnnnnnnnnnnnnnnnnnnnnnnnnnnnnnnnnnnnnnnnnnnnnnnnnnnnnnnnnnnnnnnnnnnnnnnnnnnnnnnnnnnnnnnnnnnnnnnnnnnnnnnnnnnnnnnnnnnnnnnnnnnnnnnnnnnnnnnnnnnnnnnnnnnnnnnnnnnnnnnnnnnnnnnnnnnnnnnnnnnnnnnnnnnnnnnnnnnnnnnnnnnnnnnnnnnnnnnnnnnnnnnnnnnnnnnnnnnnnnnnnnnnnnnnnnnnnnnnnnnnnnnnnnnnnnnnnnnnnnnnnnnnnnnnnnnnnnnnnnnnnnnnnnnnnnnnnnnnnnnnnnnnnnnnnnnnnnnnnnnnnnnnnnnnnnnnnnnnnnnnnnnnnnnnnnnnnnnnnnnnnnnnnnnnnnnnnnnnnnnnnnnnnnnnnnnnnnnnnnnnnnnnnnnnnnnnnnnnnnnnnnnnnnnnnnnnnnnnnnnnnnnnnnnnnnnnnnnnnnnnnnnnnnnnnnnnnnnnnnnnnnnnnnnnnnnnnnnnnnnnnnnnnnnnnnnnnnnnnnnnnnnnnnnnnnnnnnnnnnnnnnnnnnnnnnnnnnnnnnnnnnnnnnnnnnnnnnnnnnnnnnnnnnnnnnnnnnnnnnnnnnnnnnnnnnnnnnnnnnnnnnnnnnnnnnnnnnnnnnnnnnnnnnnnnnnnnnnnnnnnnnnnnnnnnnnnnnnnnnnnnnnnnnnnnnnnnnnnnnnnnnnnnnnnnnnnnnnnnnnnnnnnnnnnnnnnnnnnnnnnnnnnnnnnnnnnnnnnnnnnnnnnnnnnnnnnnnnnnnnnnnnnnnnnnnnnnnnnnnnnnnnnnnnnnnnnnnnnnnnnnnnnnnnnnnnnnnnnnnnnnnnnnnnnnnnnnnnnnnnnnnnnnnnnnnnnnnnnnnnnnnnnnnnnnnnnnnnnnnnnnnnnnnnnnnnnnnnnnnnnnnnnnnnnnnnnnnnnnnnnnnnnnnnnnnnnnnnnnnnnnnnnnnnnnnnnnnnnnnnnnnnnnnnnnnnnnnnnnnnnnnnnnnnnnnnnnnnnnnnnnnnnnnnnnnnnnnnnnnnnnnnnnnnnnnnnnnnnnnnnnnnnnnnnnnnnnnnnnnnnnnnnnnnnnnnnnnnnnnnnnnnnnnnnnnnnnnnnnnnnnnnnnnnnnnnnnnnnnnnnnnnnnnnnnnnnnnnnnnnnnnnnnnnnnnnnnnnnnnnnnnnnnnnnnnnnnnnnnnnnnnnnnnnnnnnnnnnnnnnnnnnnnnnnnnnnnnnnnnnnnnnnnnnnnnnnnnnnnnnnnnnnnnnnnnnnnnnnnnnnnnnnnnnnnnnnnnnnnnnnnnnnnnnnnnnnnnnnnnnnnnnnnnnnnnnnnnnnnnnnnnnnnnnnnnnnnnnnnnnnnnnnnnnnnnnnnnnnnnnnnnnnnnnnnnnnnnnnnnnnnnnnnnnnnnnnnnnnnnnnnnnnnnnnnnnnnnnnnnnnnnnnnnnnnnnnnnnnnnnnnnnnnnnnnnnnnnnnnnnnnnnnnnnnnnnnnnnnnnnnnnnnnnnnnnnnnnnnnnnnnnnnnnnnnnnnnnnnnnnnnnnnnnnnnnnnnnnnnnnnnnnnnnnnnnnnnnnnnnnnnnnnnnnnnnnnnnnnnnnnnnnnnnnnnnnnnnnnnnnnnnnnnnnnnnnnnnnnnnnnnnnnnnnnnnnnnnnnnnnnnnnnnnnnnnnnnnnnnnnnnnnnnnnnnnnnnnnnnnnnnnnnnnnnnnnnnnnnnnnnnnnnnnnnnnnnnnnnnnnnnnnnnnnnnnnnnnnnnnnnnnnnnnnnnnnnnnnnnnnnnnnnnnnnnnnnnnnnnnnnnnnnnnnnnnnnnnnnnnnnnnnnnnnnnnnnnnnnnnnnnnnnnnnnnnnnnnnnnnnnnnnnnnnnnnnnnnnnnnnnnnnnnnnnnnnnnnnnnnnnnnnnnnnnnnnnnnnnnnnnnnnnnnnnnnnnnnnnnnnnnnnnnnnnnnnnnnnnnnnnnnnnnnnnnnnnnnnnnnnnnnnnnnnnnnnnnnnnnnnnnnnnnnnnnnnnnnnnnnnnnnnnnnnnnnnnnnnnnnnnnnnnnnnnnnnnnnnnnnnnnnnnnnnnnnnnnnnnnnnnnnnnnnnnnnnnnnnnnnnnnnnnnnnnnnnnnnnnnnnnnnnnnnnnnnnnnnnnnnnnnnnnnnnnnnnnnnnnnnnnnnnnnnnnnnnnnnnnnnnnnnnnnnnnnnnnnnnnnnnnnnnnnnnnnnnnnnnnnnnnnnnnnnnnnnnnnnnnnnnnnnnnnnnnnnnnnnnnnnnnnnnnnnnnnnnnnnnnnnnnnnnnnnnnnnnnnnnnnnnnnnnnnnnnnnnnnnnnnnnnnnnnnnnnnnnnnnnnnnnnnnnnnnnnnnnnnnnnnnnnnnnnnnnnnnnnnnnnnnnnnnnnnnnnnnnnnnnnnnnnnnnnnnnnnnnnnnnnnnnnnnnnnnnnnnnnnnnnnnnnnnnnnnnnnnnnnnnnnnnnnnnnnnnnnnnnnnnnnnnnnnnnnnnnnnnnnnnnnnnnnnnnnnnnnnnnnnnnnnnnnnnnnnnnnnnnnnnnnnnnnnnnnnnnnnnnnnnnnnnnnnnnnnnnnnnnnnnnnnnnnnnnnnnnnnnnnnnnnnnnnnnnnnnnnnnnnnnnnnnnnnnnnnnnnnnnnnnnnnnnnnnnnnnnnnnnnnnnnnnnnnnnnnnnnnnnnnnnnnnnnnnnnnnnnnnnnnnnnnnnnnnnnnnnnnnnnnnnnnnnnnnnnnnnnnnnnnnnnnnnnnnnnnnnnnnnnnnnnnnnnnnnnnnnnnnnnnnnnnnnnnnnnnnnnnnnnnnnnnnnnnnnnnnnnnnnnnnnnnnnnnnnnnnnnnnnnnnnnnnnnnnnnnnnnnnnnnnnnnnnnnnnnnnnnnnnnnnnnnnnnnnnnnnnnnnnnnnnnnnnnnnnnnnnnnnnnnnnnnnnnnnnnnnnnnnnnnnnnnnnnnnnnnnnnnnnnnnnnnnnnnnnnnnnnnnnnnnnnnnnnnnnnnnnnnnnnnnnnnnnnnnnnnnnnnnnnnnnnnnnnnnnnnnnnnnnnnnnnnnnnnnnnnnnnnnnnnnnnnnnnnnnnnnnnnnnnnnnnnnnnnnnnnnnnnnnnnnnnnnnnnnnnnnnnnnnnnnnnnnnnnnnnnnnnnnnnnnnnnnnnnnnnnnnnnnnnnnnnnnnnnnnnnnnnnnnnnnnnnnnnnnnnnnnnnnnnnnnnnnnnnnnnnnnnnnnnnnnnnnnnnnnnnnnnnnnnnnnnnnnnnnnnnnnnnnnnnnnnnnnnnnnnnnnnnnnnnnnnnnnnnnnnnnnnnnnnnnnnnnnnnnnnnnnnnnnnnnnnnnnnnnnnnnnnnnnnnnnnnnnnnnnnnnnnnnnnnnnnnnnnnnnnnnnnnnnnnnnnnnnnnnnnnnnnnnnnnnnnnnnnnnnnnnnnnnnnnnnnnnnnnnnnnnnnnnnnnnnnnnnnnnnnnnnnnnnnnnnnnnnnnnnnnnnnnnnnnnnnnnnnnnnnnnnnnnnnnnnnnnnnnnnnnnnnnnnnnnnnnnnnnnnnnnnnnnnnnnnnnnnnnnnnnnnnnnnnnnnnnnnnnnnnnnnnnnnnnnnnnnnnnnnnnnnnnnnnnnnnnnnnnnnnnnnnnnnnnnnnnnnnnnnnnnnnnnnnnnnnnnnnnnnnnnnnnnnnnnnnnnnnnnnnnnnnnnnnnnnnnnnnnnnnnnnnnnnnnnnnnnnnnnnnnnnnnnnnnnnnnnnnnnnnnnnnnnnnnnnnnnnnnnnnnnnnnnnnnnnnnnnnnnnnnnnnnnnnnnnnnnnnnnnnnnnnnnnnnnnnnnnnnnnnnnnnnnnnnnnnnnnnnnnnnnnnnnnnnnnnnnnnnnnnnnnnnnnnnnnnnnnnnnnnnnnnnnnnnnnnnnnnnnnnnnnnnnnnnnnnnnnnnnnnnnnnnnnnnnnnnnnnnnnnnnnnnnnnnnnnnnnnnnnnnnnnnnnnnnnnnnnnnnnnnnnnnnnnnnnnnnnnnnnnnnnnnnnnnnnnnnnnnnnnnnnnnnnnnnnnnnnnnnnnnnnnnnnnnnnnnnnnnnnnnnnnnnnnnnnnnnnnnnnnnnnnnnnnnnnnnnnnnnnnnnnnnnnnnnnnnnnnnnnnnnnnnnnnnnnnnnnnnnnnnnnnnnnnnnnnnnnnnnnnnnnnnnnnnnnnnnnnnnnnnnnnnnnnnnnnnnnnnnnnnnnnnnnnnnnnnnnnnnnnnnnnnnnnnnnnnnnnnnnnnnnnnnnnnnnnnnnnnnnnnnnnnnnnnnnnnnnnnnnnnnnnnnnnnnnnnnnnnnnnnnnnnnnnnnnnnnnnnnnnnnnnnnnnnnnnnnnnnnnnnnnnnnnnnnnnnnnnnnnnnnnnnnnnnnnnnnnnnnnnnnnnnnnnnnnnnnnnnnnnnnnnnnnnnnnnnnnnnnnnnnnnnnnnnnnnnnnnnnnnnnnnnnnnnnnnnnnnnnnnnnnnnnnnnnnnnnnnnnnnnnnnnnnnnnnnnnnnnnnnnnnnnnnnnnnnnnnnnnnnnnnnnnnnnnnnnnnnnnnnnnnnnnnnnnnnnnnnnnnnnnnnnnnnnnnnnnnnnnnnnnnnnnnnnnnnnnnnnnnnnnnnnnnnnnnnnnnnnnnnnnnnnnnnnnnnnnnnnnnnnnnnnnnnnnnnnnnnnnnnnnnnnnnnnnnnnnnnnnnnnnnnnnnnnnnnnnnnnnnnnnnnnnnnnnnnnnnnnnnnnnnnnnnnnnnnnnnnnnnnnnnnnnnnnnnnnnnnnnnnnnnnnnnnnnnnnnnnnnnnnnnnnnnnnnnnnnnnnnnnnnnnnnnnnnnnnnnnnnnnnnnnnnnnnnnnnnnnnnnnnnnnnnnnnnnnnnnnnnnnnnnnnnnnnnnnnnnnnnnnnnnnnnnnnnnnnnnnnnnnnnnnnnnnnnnnnnnnnnnnnnnnnnnnnnnnnnnnnnnnnnnnnnnnnnnnnnnnnnnnnnnnnnnnnnnnnnnnnnnnnnnnnnnnnnnnnnnnnnnnnnnnnnnnnnnnnnnnnnnnnnnnnnnnnnnnnnnnnnnnnnnnnnnnnnnnnnnnnnnnnnnnnnnnnnnnnnnnnnnnnnnnnnnnnnnnnnnnnnnnnnnnnnnnnnnnnnnnnnnnnnnnnnnnnnnnnnnnnnnnnnnnnnnnnnnnnnnnnnnnnnnnnnnnnnnnnnnnnnnnnnnnnnnnnnnnnnnnnnnnnnnnnnnnnnnnnnnnnnnnnnnnnnnnnnnnnnnnnnnnnnnnnnnnnnnnnnnnnnnnnnnnnnnnnnnnnnnnnnnnnnnnnnnnnnnnnnnnnnnnnnnnnnnnnnnnnnnnnnnnnnnnnnnnnnnnnnnnnnnnnnnnnnnnnnnnnnnnnnnnnnnnnnnnnnnnnnnnnnnnnnnnnnnnnnnnnnnnnnnnnnnnnnnnnnnnnnnnnnnnnnnnnnnnnnnnnnnnnnnnnnnnnnnnnnnnnnnnnnnnnnnnnnnnnnnnnnnnnnnnnnnnnnnnnnnnnnnnnnnnnnnnnnnnnnnnnnnnnnnnnnnnnnnnnnnnnnnnnnnnnnnnnnnnnnnnnnnnnnnnnnnnnnnnnnnnnnnnnnnnnnnnnnnnnnnnnnnnnnnnnnnnnnnnnnnnnnnnnnnnnnnnnnnnnnnnnnnnnnnnnnnnnnnnnnnnnnnnnnnnnnnnnnnnnnnnnnnnnnnnnnnnnnnnnnnnnnnnnnnnnnnnnnnnnnnnnnnnnnnnnnnnnnnnnnnnnnnnnnnnnnnnnnnnnnnnnnnnnnnnnnnnnnnnnnnnnnnnnnnnnnnnnnnnnnnnnnnnnnnnnnnnnnnnnnnnnnnnnnnnnnnnnnnnnnnnnnnnnnnnnnnnnnnnnnnnnnnnnnnnnnnnnnnnnnnnnnnnnnnnnnnnnnnnnnnnnnnnnnnnnnnnnnnnnnnnnnnnnnnnnnnnnnnnnnnnnnnnnnnnnnnnnnnnnnnnnnnnnnnnnnnnnnnnnnnnnnnnnnnnnnnnnnnnnnnnnnnnnnnnnnnnnnnnnnnnnnnnnnnnnnnnnnnnnnnnnnnnnnnnnnnnnnnnnnnnnnnnnnnnnnnnnnnnnnnnnnnnnnnnnnnnnnnnnnnnnnnnnnnnnnnnnnnnnnnnnnnnnnnnnnnnnnnnnnnnnnnnnnnnnnnnnnnnnnnnnnnnnnnnnnnnnnnnnnnnnnnnnnnnnnnnnnnnnnnnnnnnnnnnnnnnnnnnnnnnnnnnnnnnnnnnnnnnnnnnnnnnnnnnnnnnnnnnnnnnnnnnnnnnnnnnnnnnnnnnnnnnnnnnnnnnnnnnnnnnnnnnnnnnnnnnnnnnnnnnnnnnnnnnnnnnnnnnnnnnnnnnnnnnnnnnnnnnnnnnnnnnnnnnnnnnnnnnnnnnnnnnnnnnnnnnnnnnnnnnnnnnnnnnnnnnnnnnnnnnnnnnnnnnnnnnnnnnnnnnnnnnnnnnnnnnnnnnnnnnnnnnnnnnnnnnnnnnnnnnnnnnnnnnnnnnnnnnnnnnnnnnnnnnnnnnnnnnnnnnnnnnnnnnnnnnnnnnnnnnnnnnnnnnnnnnnnnnnnnnnnnnnnnnnnnnnnnnnnnnnnnnnnnnnnnnnnnnnnnnnnnnnnnnnnnnnnnnnnnnnnnnnnnnnnnnnnnnnnnnnnnnnnnnnnnnnnnnnnnnnnnnnnnnnnnnnnnnnnnnnnnnnnnnnnnnnnnnnnnnnnnnnnnnnnnnnnnnnnnnnnnnnnnnnnnnnnnnnnnnnnnnnnnnnnnnnnnnnnnnnnnnnnnnnnnnnnnnnnnnnnnnnnnnnnnnnnnnnnnnnnnnnnnnnnnnnnnnnnnnnnnnnnnnnnnnnnnnnnnnnnnnnnnnnnnnnnnnnnnnnnnnnnnnnnnnnnnnnnnnnnnnnnnnnnnnnnnnnnnnnnnnnnnnnnnnnnnnnnnnnnnnnnnnnnnnnnnnnnnnnnnnnnnnnnnnnnnnnnnnnnnnnnnnnnnnnnnnnnnnnnnnnnnnnnnnnnnnnnnnnnnnnnnnnnnnnnnnnnnnnnnnnnnnnnnnnnnnnnnnnnnnnnnnnnnnnnnnnnnnnnnnnnnnnnnnnnnnnnnnnnnnnnnnnnnnnnnnnnnnnnnnnnnnnnnnnnnnnnnnnnnnnnnnnnnnnnnnnnnnnnnnnnnnnnnnnnnnnnnnnnnnnnnnnnnnnnnnnnnnnnnnnnnnnnnnnnnnnnnnnnnnnnnnnnnnnnnnnnnnnnnnnnnnnnnnnnnnnnnnnnnnnnnnnnnnnnnnnnnnnnnnnnnnnnnnnnnnnnnnnnnnnnnnnnnnnnnnnnnnnnnnnnnnnnnnnnnnnnnnnnnnnnnnnnnnnnnnnnnnnnnnnnnnnnnnnnnnnnnnnnnnnnnnnnnnnnnnnnnnnnnnnnnnnnnnnnnnnnnnnnnnnnnnnnnnnnnnnnnnnnnnnnnnnnnnnnnnnnnnnnnnnnnnnnnnnnnnnnnnnnnnnnnnnnnnnnnnnnnnnnnnnnnnnnnnnnnnnnnnnnnnnnnnnnnnnnnnnnnnnnnnnnnnnnnnnnnnnnnnnnnnnnnnnnnnnnnnnnnnnnnnnnnnnnnnnnnnnnnnnnnnnnnnnnnnnnnnnnnnnnnnnnnnnnnnnnnnnnnnnnnnnnnnnnnnnnnnnnnnnnnnnnnnnnnnnnnnnnnnnnnnnnnnnnnnnnnnnnnnnnnnnnnnnnnnnnnnnnnnnnnnnnnnnnnnnnnnnnnnnnnnnnnnnnnnnnnnnnnnnnnnnnnnnnnnnnnnnnnnnnnnnnnnnnnnnnnnnnnnnnnnnnnnnnnnnnnnnnnnnnnnnnnnnnnnnnnnnnnnnnnnnnnnnnnnnnnnnnnnnnnnnnnnnnnnnnnnnnnnnnnnnnnnnnnnnnnnnnnnnnnnnnnnnnnnnnnnnnnnnnnnnnnnnnnnnnnnnnnnnnnnnnnnnnnnnnnnnnnnnnnnnnnnnnnnnnnnnnnnnnnnnnnnnnnnnnnnnnnnnnnnnnnnnnnnnnnnnnnnnnnnnnnnnnnnnnnnnnnnnnnnnnnnnnnnnnnnnnnnnnnnnnnnnnnnnnnnnnnnnnnnnnnnnnnnnnnnnnnnnnnnnnnnnnnnnnnnnnnnnnnnnnnnnnnnnnnnnnnnnnnnnnnnnnnnnnnnnnnnnnnnnnnnnnnnnnnnnnnnnnnnnnnnnnnnnnnnnnnnnnnnnnnnnnnnnnnnnnnnnnnnnnnnnnnnnnnnnnnnnnnnnnnnnnnnnnnnnnnnnnnnnnnnnnnnnnnnnnnnnnnnnnnnnnnnnnnnnnnnnnnnnnnnnnnnnnnnnnnnnnnnnnnnnnnnnnnnnnnnnnnnnnnnnnnnnnnnnnnnnnnnnnnnnnnnnnnnnnnnnnnnnnnnnnnnnnnnnnnnnnnnnnnnnnnnnnnnnnnnnnnnnnnnnnnnnnnnnnnnnnnnnnnnnnnnnnnnnnnnnnnnnnnnnnnnnnnnnnnnnnnnnnnnnnnnnnnnnnnnnnnnnnnnnnnnnnnnnnnnnnnnnnnnnnnnnnnnnnnnnnnnnnnnnnnnnnnnnnnnnnnnnnnnnnnnnnnnnnnnnnnnnnnnnnnnnnnnnnnnnnnnnnnnnnnnnnnnnnnnnnnnnnnnnnnnnnnnnnnnnnnnnnnnnnnnnnnnnnnnnnnnnnnnnnnnnnnnnnnnnnnnnnnnnnnnnnnnnnnnnnnnnnnnnnnnnnnnnnnnnnnnnnnnnnnnnnnnnnnnnnnnnnnnnnnnnnnnnnnnnnnnnnnnnnnnnnnnnnnnnnnnnnnnnnnnnnnnnnnnnnnnnnnnnnnnnnnnnnnnnnnnnnnnnnnnnnnnnnnnnnnnnnnnnnnnnnnnnnnnnnnnnnnnnnnnnnnnnnnnnnnnnnnnnnnnnnnnnnnnnnnnnnnnnnnnnnnnnnnnnnnnnnnnnnnnnnnnnnnnnnnnnnnnnnnnnnnnnnnnnnnnnnnnnnnnnnnnnnnnnnnnnnnnnnnnnnnnnnnnnnnnnnnnnnnnnnnnnnnnnnnnnnnnnnnnnnnnnnnnnnnnnnnnnnnnnnnnnnnnnnnnnnnnnnnnnnnnnnnnnnnnnnnnnnnnnnnnnnnnnnnnnnnnnnnnnnnnnnnnnnnnnnnnnnnnnnnnnnnnnnnnnnnnnnnnnnnnnnnnnnnnnnnnnnnnnnnnnnnnnnnnnnnnnnnnnnnnnnnnnnnnnnnnnnnnnnnnnnnnnnnnnnnnnnnnnnnnnnnnnnnnnnnnnnnnnnnnnnnnnnnnnnnnnnnnnnnnnnnnnnnnnnnnnnnnnnnnnnnnnnnnnnnnnnnnnnnnnnnnnnnnnnnnnnnnnnnnnnnnnnnnnnnnnnnnnnnnnnnnnnnnnnnnnnnnnnnnnnnnnnnnnnnnnnnnnnnnnnnnnnnnnnnnnnnnnnnnnnnnnnnnnnnnnnnnnnnnnnnnnnnnnnnnnnnnnnnnnnnnnnnnnnnnnnnnnnnnnnnnnnnnnnnnnnnnnnnnnnnnnnnnnnnnnnnnnnnnnnnnnnnnnnnnnnnnnnnnnnnnnnnnnnnnnnnnnnnnnnnnnnnnnnnnnnnnnnnnnnnnnnnnnnnnnnnnnnnnnnnnnnnnnnnnnnnnnnnnnnnnnnnnnnnnnnnnnnnnnnnnnnnnnnnnnnnnnnnnnnnnnnnnnnnnnnnnnnnnnnnnnnnnnnnnnnnnnnnnnnnnnnnnnnnnnnnnnnnnnnnnnnnnnnnnnnnnnnnnnnnnnnnnnnnnnnnnnnnnnnnnnnnnnnnnnnnnnnnnnnnnnnnnnnnnnnnnnnnnnnnnnnnnnnnnnnnnnnnnnnnnnnnnnnnnnnnnnnnnnnnnnnnnnnnnnnnnnnnnnnnnnnnnnnnnnnnnnnnnnnnnnnnnnnnnnnnnnnnnnnnnnnnnnnnnnnnnnnnnnnnnnnnnnnnnnnnnnnnnnnnnnnnnnnnnnnnnnnnnnnnnnnnnnnnnnnnnnnnnnnnnnnnnnnnnnnnnnnnnnnnnnnnnnnnnnnnnnnnnnnnnnnnnnnnnnnnnnnnnnnnnnnnnnnnnnnnnnnnnnnnnnnnnnnnnnnnnnnnnnnnnnnnnnnnnnnnnnnnnnnnnnnnnnnnnnnnnnnnnnnnnnnnnnnnnnnnnnnnnnnnnnnnnnnnnnnnnnnnnnnnnnnnnnnnnnnnnnnnnnnnnnnnnnnnnnnnnnnnnnnnnnnnnnnnnnnnnnnnnnnnnnnnnnnnnnnnnnnnnnnnnnnnnnnnnnnnnnnnnnnnnnnnnnnnnnnnnnnnnnnnnnnnnnnnnnnnnnnnnnnnnnnnnnnnnnnnnnnnnnnnnnnnnnnnnnnnnnnnnnnnnnnnnnnnnnnnnnnnnnnnnnnnnnnnnnnnnnnnnnnnnnnnnnnnnnnnnnnnnnnnnnnnnnnnnnnnnnnnnnnnnnnnnnnnnnnnnnnnnnnnnnnnnnnnnnnnnnnnnnnnnnnnnnnnnnnnnnnnnnnnnnnnnnnnnnnnnnnnnnnnnnnnnnnnnnnnnnnnnnnnnnnnnnnnnnnnnnnnnnnnnnnnnnnnnnnnnnnnnnnnnnnnnnnnnnnnnnnnnnnnnnnnnnnnnnnnnnnnnnnnnnnnnnnnnnnnnnnnnnnnnnnnnnnnnnnnnnnnnnnnnnnnnnnnnnnnnnnnnnnnnnnnnnnnnnnnnnnnnnnnnnnnnnnnnnnnnnnnnnnnnnnnnnnnnnnnnnnnnnnnnnnnnnnnnnnnnnnnnnnnnnnnnnnnnnnnnnnnnnnnnnnnnnnnnnnnnnnnnnnnnnnnnnnnnnnnnnnnnnnnnnnnnnnnnnnnnnnnnnnnnnnnnnnnnnnnnnnnnnnnnnnnnnnnnnnnnnnnnnnnnnnnnnnnnnnnnnnnnnnnnnnnnnnnnnnnnnnnnnnnnnnnnnnnnnnnnnnnnnnnnnnnnnnnnnnnnnnnnnnnnnnnnnnnnnnnnnnnnnnnnnnnnnnnnnnnnnnnnnnnnnnnnnnnnnnnnnnnnnnnnnnnnnnnnnnnnnnnnnnnnnnnnnnnnnnnnnnnnnnnnnnnnnnnnnnnnnnnnnnnnnnnnnnnnnnnnnnnnnnnnnnnnnnnnnnnnnnnnnnnnnnnnnnnnnnnnnnnnnnnnnnnnnnnnnnnnnnnnnnnnnnnnnnnnnnnnnnnnnnnnnnnnnnnnnnnnnnnnnnnnnnnnnnnnnnnnnnnnnnnnnnnnnnnnnnnnnnnnnnnnnnnnnnnnnnnnnnnnnnnnnnnnnnnnnnnnnnnnnnnnnnnnnnnnnnnnnnnnnnnnnnnnnnnnnnnnnnnnnnnnnnnnnnnnnnnnnnnnnnnnnnnnnnnnnnnnnnnnnnnnnnnnnnnnnnnnnnnnnnnnnnnnnnnnnnnnnnnnnnnnnnnnnnnnnnnnnnnnnnnnnnnnnnnnnnnnnnnnnnnnnnnnnnnnnnnnnnnnnnnnnnnnnnnnnnnnnnnnnnnnnnnnnnnnnnnnnnnnnnnnnnnnnnnnnnnnnnnnnnnnnnnnnnnnnnnnnnnnnnnnnnnnnnnnnnnnnnnnnnnnnnnnnnnnnnnnnnnnnnnnnnnnnnnnnnnnnnnnnnnnnnnnnnnnnnnnnnnnnnnnnnnnnnnnnnnnnnnnnnnnnnnnnnnnnnnnnnnnnnnnnnnnnnnnnnnnnnnnnnnnnnnnnnnnnnnnnnnnnnnnnnnnnnnnnnnnnnnnnnnnnnnnnnnnnnnnnnnnnnnnnnnnnnnnnnnnnnnnnnnnnnnnnnnnnnnnnnnnnnnnnnnnnnnnnnnnnnnnnnnnnnnnnnnnnnnnnnnnnnnnnnnnnnnnnnnnnnnnnnnnnnnnnnnnnnnnnnnnnnnnnnnnnnnnnnnnnnnnnnnnnnnnnnnnnnnnnnnnnnnnnnnnnnnnnnnnnnnnnnnnnnnnnnnnnnnnnnnnnnnnnnnnnnnnnnnnnnnnnnnnnnnnnnnnnnnnnnnnnnnnnnnnnnnnnnnnnnnnnnnnnnnnnnnnnnnnnnnnnnnnnnnnnnnnnnnnnnnnnnnnnnnnnnnnnnnnnnnnnnnnnnnnnnnnnnnnnnnnnnnnnnnnnnnnnnnnnnnnnnnnnnnnnnnnnnnnnnnnnnnnnnnnnnnnnnnnnnnnnnnnnnnnnnnnnnnnnnnnnnnnnnnnnnnnnnnnnnnnnnnnnnnnnnnnnnnnnnnnnnnnnnnnnnnnnnnnnnnnnnnnnnnnnnnnnnnnnnnnnnnnnnnnnnnnnnnnnnnnnnnnnnnnnnnnnnnnnnnnnnnnnnnnnnnnnnnnnnnnnnnnnnnnnnnnnnnnnnnnnnnnnnnnnnnnnnnnnnnnnnnnnnnnnnnnnnnnnnnnnnnnnnnnnnnnnnnnnnnnnnnnnnnnnnnnnnnnnnnnnnnnnnnnnnnnnnnnnnnnnnnnnnnnnnnnnnnnnnnnnnnnnnnnnnnnnnnnnnnnnnnnnnnnnnnnnnnnnnnnnnnnnnnnnnnnnnnnnnnnnnnnnnnnnnnnnnnnnnnnnnnnnnnnnnnnnnnnnnnnnnnnnnnnnnnnnnnnnnnnnnnnnnnnnnnnnnnnnnnnnnnnnnnnnnnnnnnnnnnnnnnnnnnnnnnnnnnnnnnnnnnnnnnnnnnnnnnnnnnnnnnnnnnnnnnnnnnnnnnnnnnnnnnnnnnnnnnnnnnnnnnnnnnnnnnnnnnnnnnnnnnnnnnnnnnnnnnnnnnnnnnnnnnnnnnnnnnnnnnnnnnnnnnnnnnnnnnnnnnnnnnnnnnnnnnnnnnnnnnnnnnnnnnnnnnnnnnnnnnnnnnnnnnnnnnnnnnnnnnnnnnnnnnnnnnnnnnnnnnnnnnnnnnnnnnnnnnnnnnnnnnnnnnnnnnnnnnnnnnnnnnnnnnnnnnnnnnnnnnnnnnnnnnnnnnnnnnnnnnnnnnnnnnnnnnnnnnnnnnnnnnnnnnnnnnnnnnnnnnnnnnnnnnnnnnnnnnnnnnnnnnnnnnnnnnnnnnnnnnnnnnnnnnnnnnnnnnnnnnnnnnnnnnnnnnnnnnnnnnnnnnnnnnnnnnnnnnnnnnnnnnnnnnnnnnnnnnnnnnnnnnnnnnnnnnnnnnnnnnnnnnnnnnnnnnnnnnnnnnnnnnnnnnnnnnnnnnnnnnnnnnnnnnnnnnnnnnnnnnnnnnnnnnnnnnnnnnnnnnnnnnnnnnnnnnnnnnnnnnnnnnnnnnnnnnnnnnnnnnnnnnnnnnnnnnnnnnnnnnnnnnnnnnnnnnnnnnnnnnnnnnnnnnnnnnnnnnnnnnnnnnnnnnnnnnnnnnnnnnnnnnnnnnnnnnnnnnnnnnnnnnnnnnnnnnnnnnnnnnnnnnnnnnnnnnnnnnnnnnnnnnnnnnnnnnnnnnnnnnnnnnnnnnnnnnnnnnnnnnnnnnnnnnnnnnnnnnnnnnnnnnnnnnnnnnnnnnnnnnnnnnnnnnnnnnnnnnnnnnnnnnnnnnnnnnnnnnnnnnnnnnnnnnnnnnnnnnnnnnnnnnnnnnnnnnnnnnnnnnnnnnnnnnnnnnnnnnnnnnnnnnnnnnnnnnnnnnnnnnnnnnnnnnnnnnnnnnnnnnnnnnnnnnnnnnnnnnnnnnnnnnnnnnnnnnnnnnnnnnnnnnnnnnnnnnnnnnnnnnnnnnnnnnnnnnnnnnnnnnnnnnnnnnnnnnnnnnnnnnnnnnnnnnnnnnnnnnnnnnnnnnnnnnnnnnnnnnnnnnnnnnnnnnnnnnnnnnnnnnnnnnnnnnnnnnnnnnnnnnnnnnnnnnnnnnnnnnnnnnnnnnnnnnnnnnnnnnnnnnnnnnnnnnnnnnnnnnnnnnnnnnnnnnnnnnnnnnnnnnnnnnnnnnnnnnnnnnnnnnnnnnnnnnnnnnnnnnnnnnnnnnnnnnnnnnnnnnnnnnnnnnnnnnnnnnnnnnnnnnnnnnnnnnnnnnnnnnnnnnnnnnnnnnnnnnnnnnnnnnnnnnnnnnnnnnnnnnnnnnnnnnnnnnnnnnnnnnnnnnnnnnnnnnnnnnnnnnnnnnnnnnnnnnnnnnnnnnnnnnnnnnnnnnnnnnnnnnnnnnnnnnnnnnnnnnnnnnnnnnnnnnnnnnnnnnnnnnnnnnnnnnnnnnnnnnnnnnnnnnnnnnnnnnnnnnnnnnnnnnnnnnnnnnnnnnnnnnnnnnnnnnnnnnnnnnnnnnnnnnnnnnnnnnnnnnnnnnnnnnnnnnnnnnnnnnnnnnnnnnnnnnnnnnnnnnnnnnnnnnnnnnnnnnnnnnnnnnnnnnnnnnnnnnnnnnnnnnnnnnnnnnnnnnnnnnnnnnnnnnnnnnnnnnnnnnnnnnnnnnnnnnnnnnnnnnnnnnnnnnnnnnnnnnnnnnnnnnnnnnnnnnnnnnnnnnnnnnnnnnnnnnnnnnnnnnnnnnnnnnnnnnnnnnnnnnnnnnnnnnnnnnnnnnnnnnnnnnnnnnnnnnnnnnnnnnnnnnnnnnnnnnnnnnnnnnnnnnnnnnnnnnnnnnnnnnnnnnnnnnnnnnnnnnnnnnnnnnnnnnnnnnnnnnnnnnnnnnnnnnnnnnnnnnnnnnnnnnnnnnnnnnnnnnnnnnnnnnnnnnnnnnnnnnnnnnnnnnnnnnnnnnnnnnnnnnnnnnnnnnnnnnnnnnnnnnnnnnnnnnnnnnnnnnnnnnnnnnnnnnnnnnnnnnnnnnnnnnnnnnnnnnnnnnnnnnnnnnnnnnnnnnnnnnnnnnnnnnnnnnnnnnnnnnnnnnnnnnnnnnnnnnnnnnnnnnnnnnnnnnnnnnnnnnnnnnnnnnnnnnnnnnnnnnnnnnnnnnnnnnnnnnnnnnnnnnnnnnnnnnnnnnnnnnnnnnnnnnnnnnnnnnnnnnnnnnnnnnnnnnnnnnnnnnnnnnnnnnnnnnnnnnnnnnnnnnnnnnnnnnnnnnnnnnnnnnnnnnnnnnnnnnnnnnnnnnnnnnnnnnnnnnnnnnnnnnnnnnnnnnnnnnnnnnnnnnnnnnnnnnnnnnnnnnnnnnnnnnnnnnnnnnnnnnnnnnnnnnnnnnnnnnnnnnnnnnnnnnnnnnnnnnnnnnnnnnnnnnnnnnnnnnnnnnnnnnnnnnnnnnnnnnnnnnnnnnnnnnnnnnnnnnnnnnnnnnnnnnnnnnnnnnnnnnnnnnnnnnnnnnnnnnnnnnnnnnnnnnnnnnnnnnnnnnnnnnnnnnnnnnnnnnnnnnnnnnnnnnnnnnnnnnnnnnnnnnnnnnnnnnnnnnnnnnnnnnnnnnnnnnnnnnnnnnnnnnnnnnnnnnnnnnnnnnnnnnnnnnnnnnnnnnnnnnnnnnnnnnnnnnnnnnnnnnnnnnnnnnnnnnnnnnnnnnnnnnnnnnnnnnnnnnnnnnnnnnnnnnnnnnnnnnnnnnnnnnnnnnnnnnnnnnnnnnnnnnnnnnnnnnnnnnnnnnnnnnnnnnnnnnnnnnnnnnnnnnnnnnnnnnnnnnnnnnnnnnnnnnnnnnnnnnnnnnnnnnnnnnnnnnnnnnnnnnnnnnnnnnnnnnnnnnnnnnnnnnnnnnnnnnnnnnnnnnnnnnnnnnnnnnnnnnnnnnnnnnnnnnnnnnnnnnnnnnnnnnnnnnnnnnnnnnnnnnnnnnnnnnnnnnnnnnnnnnnnnnnnnnnnnnnnnnnnnnnnnnnnnnnnnnnnnnnnnnnnnnnnnnnnnnnnnnnnnnnnnnnnnnnnnnnnnnnnnnnnnnnnnnnnnnnnnnnnnnnnnnnnnnnnnnnnnnnnnnnnnnnnnnnnnnnnnnnnnnnnnnnnnnnnnnnnnnnnnnnnnnnnnnnnnnnnnnnnnnnnnnnnnnnnnnnnnnnnnnnnnnnnnnnnnnnnnnnnnnnnnnnnnnnnnnnnnnnnnnnnnnnnnnnnnnnnnnnnnnnnnnnnnnnnnnnnnnnnnnnnnnnnnnnnnnnnnnnnnnnnnnnnnnnnnnnnnnnnnnnnnnnnnnnnnnnnnnnnnnnnnnnnnnnnnnnnnnnnnnnnnnnnnnnnnnnnnnnnnnnnnnnnnnnnnnnnnnnnnnnnnnnnnnnnnnnnnnnnnnnnnnnnnnnnnnnnnnnnnnnnnnnnnnnnnnnnnnnnnnnnnnnnnnnnnnnnnnnnnnnnnnnnnnnnnnnnnnnnnnnnnnnnnnnnnnnnnnnnnnnnnnnnnnnnnnnnnnnnnnnnnnnnnnnnnnnnnnnnnnnnnnnnnnnnnnnnnnnnnnnnnnnnnnnnnnnnnnnnnnnnnnnnnnnnnnnnnnnnnnnnnnnnnnnnnnnnnnnnnnnnnnnnnnnnnnnnnnnnnnnnnnnnnnnnnnnnnnnnnnnnnnnnnnnnnnnnnnnnnnnnnnnnnnnnnnnnnnnnnnnnnnnnnnnnnnnnnnnnnnnnnnnnnnnnnnnnnnnnnnnnnnnnnnnnnnnnnnnnnnnnnnnnnnnnnnnnnnnnnnnnnnnnnnnnnnnnnnnnnnnnnnnnnnnnnnnnnnnnnnnnnnnnnnnnnnnnnnnnnnnnnnnnnnnnnnnnnnnnnnnnnnnnnnnnnnnnnnnnnnnnnnnnnnnnnnnnnnnnnnnnnnnnnnnnnnnnnnnnnnnnnnnnnnnnnnnnnnnnnnnnnnnnnnnnnnnnnnnnnnnnnnnnnnnnnnnnnnnnnnnnnnnnnnnnnnnnnnnnnnnnnnnnnnnnnnnnnnnnnnnnnnnnnnnnnnnnnnnnnnnnnnnnnnnnnnnnnnnnnnnnnnnnnnnnnnnnnnnnnnnnnnnnnnnnnnnnnnnnnnnnnnnnnnnnnnnnnnnnnnnnnnnnnnnnnnnnnnnnnnnnnnnnnnnnnnnnnnnnnnnnnnnnnnnnnnnnnnnnnnnnnnnnnnnnnnnnnnnnnnnnnnnnnnnnnnnnnnnnnnnnnnnnnnnnnnnnnnnnnnnnnnnnnnnnnnnnnnnnnnnnnnnnnnnnnnnnnnnnnnnnnnnnnnnnnnnnnnnnnnnnnnnnnnnnnnnnnnnnnnnnnnnnnnnnnnnnnnnnnnnnnnnnnnnnnnnnnnnnnnnnnnnnnnnnnnnnnnnnnnnnnnnnnnnnnnnnnnnnnnnnnnnnnnnnnnnnnnnnnnnnnnnnnnnnnnnnnnnnnnnnnnnnnnnnnnnnnnnnnnnnnnnnnnnnnnnnnnnnnnnnnnnnnnnnnnnnnnnnnnnnnnnnnnnnnnnnnnnnnnnnnnnnnnnnnnnnnnnnnnnnnnnnnnnnnnnnnnnnnnnnnnnnnnnnnnnnnnnnnnnnnnnnnnnnnnnnnnnnnnnnnnnnnnnnnnnnnnnnnnnnnnnnnnnnnnnnnnnnnnnnnnnnnnnnnnnnnnnnnnnnnnnnnnnnnnnnnnnnnnnnnnnnnnnnnnnnnnnnnnnnnnnnnnnnnnnnnnnnnnnnnnnnnnnnnnnnnnnnnnnnnnnnnnnnnnnnnnnnnnnnnnnnnnnnnnnnnnnnnnnnnnnnnnnnnnnnnnnnnnnnnnnnnnnnnnnnnnnnnnnnnnnnnnnnnnnnnnnnnnnnnnnnnnnnnnnnnnnnnnnnnnnnnnnnnnnnnnnnnnnnnnnnnnnnnnnnnnnnnnnnnnnnnnnnnnnnnnnnnnnnnnnnnnnnnnnnnnnnnnnnnnnnnnnnnnnnnnnnnnnnnnnnnnnnnnnnnnnnnnnnnnnnnnnnnnnnnnnnnnnnnnnnnnnnnnnnnnnnnnnnnnnnnnnnnnnnnnnnnnnnnnnnnnnnnnnnnnnnnnnnnnnnnnnnnnnnnnnnnnnnnnnnnnnnnnnnnnnnnnnnnnnnnnnnnnnnnnnnnnnnnnnnnnnnnnnnnnnnnnnnnnnnnnnnnnnnnnnnnnnnnnnnnnnnnnnnnnnnnnnnnnnnnnnnnnnnnnnnnnnnnnnnnnnnnnnnnnnnnnnnnnnnnnnnnnnnnnnnnnnnnnnnnnnnnnnnnnnnnnnnnnnnnnnnnnnnnnnnnnnnnnnnnnnnnnnnnnnnnnnnnnnnnnnnnnnnnnnnnnnnnnnnnnnnnnnnnnnnnnnnnnnnnnnnnnnnnnnnnnnnnnnnnnnnnnnnnnnnnnnnnnnnnnnnnnnnnnnnnnnnnnnnnnnnnnnnnnnnnnnnnnnnnnnnnnnnnnnnnnnnnnnnnnnnnnnnnnnnnnnnnnnnnnnnnnnnnnnnnnnnnnnnnnnnnnnnnnnnnnnnnnnnnnnnnnnnnnnnnnnnnnnnnnnnnnnnnnnnnnnnnnnnnnnnnnnnnnnnnnnnnnnnnnnnnnnnnnnnnnnnnnnnnnnnnnnnnnnnnnnnnnnnnnnnnnnnnnnnnnnnnnnnnnnnnnnnnnnnnnnnnnnnnnnnnnnnnnnnnnnnnnnnnnnnnnnnnnnnnnnnnnnnnnnnnnnnnnnnnnnnnnnnnnnnnnnnnnnnnnnnnnnnnnnnnnnnnnnnnnnnnnnnnnnnnnnnnnnnnnnnnnnnnnnnnnnnnnnnnnnnnnnnnnnnnnnnnnnnnnnnnnnnnnnnnnnnnnnnnnnnnnnnnnnnnnnnnnnnnnnnnnnnnnnnnnnnnnnnnnnnnnnnnnnnnnnnnnnnnnnnnnnnnnnnnnnnnnnnnnnnnnnnnnnnnnnnnnnnnnnnnnnnnnnnnnnnnnnnnnnnnnnnnnnnnnnnnnnnnnnnnnnnnnnnnnnnnnnnnnnnnnnnnnnnnnnnnnnnnnnnnnnnnnnnnnnnnnnnnnnnnnnnnnnnnnnnnnnnnnnnnnnnnnnnnnnnnnnnnnnnnnnnnnnnnnnnnnnnnnnnnnnnnnnnnnnnnnnnnnnnnnnnnnnnnnnnnnnnnnnnnnnnnnnnnnnnnnnnnnnnnnnnnnnnnnnnnnnnnnnnnnnnnnnnnnnnnnnnnnnnnnnnnnnnnnnnnnnnnnnnnnnnnnnnnnnnnnnnnnnnnnnnnnnnnnnnnnnnnnnnnnnnnnnnnnnnnnnnnnnnnnnnnnnnnnnnnnnnnnnnnnnnnnnnnnnnnnnnnnnnnnnnnnnnnnnnnnnnnnnnnnnnnnnnnnnnnnnnnnnnnnnnnnnnnnnnnnnnnnnnnnnnnnnnnnnnnnnnnnnnnnnnnnnnnnnnnnnnnnnnnnnnnnnnnnnnnnnnnnnnnnnnnnnnnnnnnnnnnnnnnnnnnnnnnnnnnnnnnnnnnnnnnnnnnnnnnnnnnnnnnnnnnnnnnnnnnnnnnnnnnnnnnnnnnnnnnnnnnnnnnnnnnnnnnnnnnnnnnnnnnnnnnnnnnnnnnnnnnnnnnnnnnnnnnnnnnnnnnnnnnnnnnnnnnnnnnnnnnnnnnnnnnnnnnnnnnnnnnnnnnnnnnnnnnnnnnnnnnnnnnnnnnnnnnnnnnnnnnnnnnnnnnnnnnnnnnnnnnnnnnnnnnnnnnnnnnnnnnnnnnnnnnnnnnnnnnnnnnnnnnnnnnnnnnnnnnnnnnnnnnnnnnnnnnnnnnnnnnnnnnnnnnnnnnnnnnnnnnnnnnnnnnnnnnnnnnnnnnnnnnnnnnnnnnnnnnnnnnnnnnnnnnnnnnnnnnnnnnnnnnnnnnnnnnnnnnnnnnnnnnnnnnnnnnnnnnnnnnnnnnnnnnnnnnnnnnnnnnnnnnnnnnnnnnnnnnnnnnnnnnnnnnnnnnnnnnnnnnnnnnnnnnnnnnnnnnnnnnnnnnnnnnnnnnnnnnnnnnnnnnnnnnnnnnnnnnnnnnnnnnnnnnnnnnnnnnnnnnnnnnnnnnnnnnnnnnnnnnnnnnnnnnnnnnnnnnnnnnnnnnnnnnnnnnnnnnnnnnnnnnnnnnnnnnnnnnnnnnnnnnnnnnnnnnnnnnnnnnnnnnnnnnnnnnnnnnnnnnnnnnnnnnnnnnnnnnnnnnnnnnnnnnnnnnnnnnnnnnnnnnnnnnnnnnnnnnnnnnnnnnnnnnnnnnnnnnnnnnnnnnnnnnnnnnnnnnnnnnnnnnnnnnnnnnnnnnnnnnnnnnnnnnnnnnnnnnnnnnnnnnnnnnnnnnnnnnnnnnnnnnnnnnnnnnnnnnnnnnnnnnnnnnnnnnnnnnnnnnnnnnnnnnnnnnnnnnnnnnnnnnnnnnnnnnnnnnnnnnnnnnnnnnnnnnnnnnnnnnnnnnnnnnnnnnnnnnnnnnnnnnnnnnnnnnnnnnnnnnnnnnnnnnnnnnnnnnnnnnnnnnnnnnnnnnnnnnnnnnnnnnnnnnnnnnnnnnnnnnnnnnnnnnnnnnnnnnnnnnnnnnnnnnnnnnnnnnnnnnnnnnnnnnnnnnnnnnnnnnnnnnnnnnnnnnnnnnnnnnnnnnnnnnnnnnnnnnnnnnnnnnnnnnnnnnnnnnnnnnnnnnnnnnnnnnnnnnnnnnnnnnnnnnnnnnnnnnnnnnnnnnnnnnnnnnnnnnnnnnnnnnnnnnnnnnnnnnnnnnnnnnnnnnnnnnnnnnnnnnnnnnnnnnnnnnnnnnnnnnnnnnnnnnnnnnnnnnnnnnnnnnnnnnnnnnnnnnnnnnnnnnnnnnnnnnnnnnnnnnnnnnnnnnnnnnnnnnnnnnnnnnnnnnnnnnnnnnnnnnnnnnnnnnnnnnnnnnnnnnnnnnnnnnnnnnnnnnnnnnnnnnnnnnnnnnnnnnnnnnnnnnnnnnnnnnnnnnnnnnnnnnnnnnnnnnnnnnnnnnnnnnnnnnnnnnnnnnnnnnnnnnnnnnnnnnnnnnnnnnnnnnnnnnnnnnnnnnnnnnnnnnnnnnnnnnnnnnnnnnnnnnnnnnnnnnnnnnnnnnnnnnnnnnnnnnnnnnnnnnnnnnnnnnnnnnnnnnnnnnnnnnnnnnnnnnnnnnnnnnnnnnnnnnnnnnnnnnnnnnnnnnnnnnnnnnnnnnnnnnnnnnnnnnnnnnnnnnnnnnnnnnnnnnnnnnnnnnnnnnnnnnnnnnnnnnnnnnnnnnnnnnnnnnnnnnnnnnnnnnnnnnnnnnnnnnnnnnnnnnnnnnnnnnnnnnnnnnnnnnnnnnnnnnnnnnnnnnnnnnnnnnnnnnnnnnnnnnnnnnnnnnnnnnnnnnnnnnnnnnnnnnnnnnnnnnnnnnnnnnnnnnnnnnnnnnnnnnnnnnnnnnnnnnnnnnnnnnnnnnnnnnnnnnnnnnnnnnnnnnnnnnnnnnnnnnnnnnnnnnnnnnnnnnnnnnnnnnnnnnnnnnnnnnnnnnnnnnnnnnnnnnnnnnnnnnnnnnnnnnnnnnnnnnnnnnnnnnnnnnnnnnnnnnnnnnnnnnnnnnnnnnnnnnnnnnnnnnnnnnnnnnnnnnnnnnnnnnnnnnnnnnnnnnnnnnnnnnnnnnnnnnnnnnnnnnnnnnnnnnnnnnnnnnnnnnnnnnnnnnnnnnnnnnnnnnnnnnnnnnnnnnnnnnnnnnnnnnnnnnnnnnnnnnnnnnnnnnnnnnnnnnnnnnnnnnnnnnnnnnnnnnnnnnnnnnnnnnnnnnnnnnnnnnnnnnnnnnnnnnnnnnnnnnnnnnnnnnnnnnnnnnnnnnnnnnnnnnnnnnnnnnnnnnnnnnnnnnnnnnnnnnnnnnnnnnnnnnnnnnnnnnnnnnnnnnnnnnnnnnnnnnnnnnnnnnnnnnnnnnnnnnnnnnnnnnnnnnnnnnnnnnnnnnnnnnnnnnnnnnnnnnnnnnnnnnnnnnnnnnnnnnnnnnnnnnnnnnnnnnnnnnnnnnnnnnnnnnnnnnnnnnnnnnnnnnnnnnnnnnnnnnnnnnnnnnnnnnnnnnnnnnnnnnnnnnnnnnnnnnnnnnnnnnnnnnnnnnnnnnnnnnnnnnnnnnnnnnnnnnnnnnnnnnnnnnnnnnnnnnnnnnnnnnnnnnnnnnnnnnnnnnnnnnnnnnnnnnnnnnnnnnnnnnnnnnnnnnnnnnnnnnnnnnnnnnnnnnnnnnnnnnnnnnnnnnnnnnnnnnnnnnnnnnnnnnnnnnnnnnnnnnnnnnnnnnnnnnnnnnnnnnnnnnnnnnnnnnnnnnnnnnnnnnnnnnnnnnnnnnnnnnnnnnnnnnnnnnnnnnnnnnnnnnnnnnnnnnnnnnnnnnnnnnnnnnnnnnnnnnnnnnnnnnnnnnnnnnnnnnnnnnnnnnnnnnnnnnnnnnnnnnnnnnnnnnnnnnnnnnnnnnnnnnnnnnnnnnnnnnnnnnnnnnnnnnnnnnnnnnnnnnnnnnnnnnnnnnnnnnnnnnnnnnnnnnnnnnnnnnnnnnnnnnnnnnnnnnnnnnnnnnnnnnnnnnnnnnnnnnnnnnnnnnnnnnnnnnnnnnnnnnnnnnnnnnnnnnnnnnnnnnnnnnnnnnnnnnnnnnnnnnnnnnnnnnnnnnnnnnnnnnnnnnnnnnnnnnnnnnnnnnnnnnnnnnnnnnnnnnnnnnnnnnnnnnnnnnnnnnnnnnnnnnnnnnnnnnnnnnnnnnnnnnnnnnnnnnnnnnnnnnnnnnnnnnnnnnnnnnnnnnnnnnnnnnnnnnnnnnnnnnnnnnnnnnnnnnnnnnnnnnnnnnnnnnnnnnnnnnnnnnnnnnnnnnnnnnnnnnnnnnnnnnnnnnnnnnnnnnnnnnnnnnnnnnnnnnnnnnnnnnnnnnnnnnnnnnnnnnnnnnnnnnnnnnnnnnnnnnnnnnnnnnnnnnnnnnnnnnnnnnnnnnnnnnnnnnnnnnnnnnnnnnnnnnnnnnnnnnnnnnnnnnnnnnnnnnnnnnnnnnnnnnnnnnnnnnnnnnnnnnnnnnnnnnnnnnnnnnnnnnnnnnnnnnnnnnnnnnnnnnnnnnnnnnnnnnnnnnnnnnnnnnnnnnnnnnnnnnnnnnnnnnnnnnnnnnnnnnnnnnnnnnnnnnnnnnnnnnnnnnnnnnnnnnnnnnnnnnnnnnnnnnnnnnnnnnnnnnnnnnnnnnnnnnnnnnnnnnnnnnnnnnnnnnnnnnnnnnnnnnnnnnnnnnnnnnnnnnnnnnnnnnnnnnnnnnnnnnnnnnnnnnnnnnnnnnnnnnnnnnnnnnnnnnnnnnnnnnnnnnnnnnnnnnnnnnnnnnnnnnnnnnnnnnnnnnnnnnnnnnnnnnnnnnnnnnnnnnnnnnnnnnnnnnnnnnnnnnnnnnnnnnnnnnnnnnnnnnnnnnnnnnnnnnnnnnnnnnnnnnnnnnnnnnnnnnnnnnnnnnnnnnnnnnnnnnnnnnnnnnnnnnnnnnnnnnnnnnnnnnnnnnnnnnnnnnnnnnnnnnnnnnnnnnnnnnnnnnnnnnnnnnnnnnnnnnnnnnnnnnnnnnnnnnnnnnnnnnnnnnnnnnnnnnnnnnnnnnnnnnnnnnnnnnnnnnnnnnnnnnnnnnnnnnnnnnnnnnnnnnnnnnnnnnnnnnnnnnnnnnnnnnnnnnnnnnnnnnnnnnnnnnnnnnnnnnnnnnnnnnnnnnnnnnnnnnnnnnnnnnnnnnnnnnnnnnnnnnnnnnnnnnnnnnnnnnnnnnnnnnnnnnnnnnnnnnnnnnnnnnnnnnnnnnnnnnnnnnnnnnnnnnnnnnnnnnnnnnnnnnnnnnnnnnnnnnnnnnnnnnnnnnnnnnnnnnnnnnnnnnnnnnnnnnnnnnnnnnnnnnnnnnnnnnnnnnnnnnnnnnnnnnnnnnnnnnnnnnnnnnnnnnnnnnnnnnnnnnnnnnnnnnnnnnnnnnnnnnnnnnnnnnnnnnnnnnnnnnnnnnnnnnnnnnnnnnnnnnnnnnnnnnnnnnnnnnnnnnnnnnnnnnnnnnnnnnnnnnnnnnnnnnnnnnnnnnnnnnnnnnnnnnnnnnnnnnnnnnnnnnnnnnnnnnnnnnnnnnnnnnnnnnnnnnnnnnnnnnnnnnnnnnnnnnnnnnnnnnnnnnnnnnnnnnnnnnnnnnnnnnnnnnnnnnnnnnnnnnnnnnnnnnnnnnnnnnnnnnnnnnnnnnnnnnnnnnnnnnnnnnnnnnnnnnnnnnnnnnnnnnnnnnnnnnnnnnnnnnnnnnnnnnnnnnnnnnnnnnnnnnnnnnnnnnnnnnnnnnnnnnnnnnnnnnnnnnnnnnnnnnnnnnnnnnnnnnnnnnnnnnnnnnnnnnnnnnnnnnnnnnnnnnnnnnnnnnnnnnnnnnnnnnnnnnnnnnnnnnnnnnnnnnnnnnnnnnnnnnnnnnnnnnnnnnnnnnnnnnnnnnnnnnnnnnnnnnnnnnnnnnnnnnnnnnnnnnnnnnnnnnnnnnnnnnnnnnnnnnnnnnnnnnnnnnnnnnnnnnnnnnnnnnnnnnnnnnnnnnnnnnnnnnnnnnnnnnnnnnnnnnnnnnnnnnnnnnnnnnnnnnnnnnnnnnnnnnnnnnnnnnnnnnnnnnnnnnnnnnnnnnnnnnnnnnnnnnnnnnnnnnnnnnnnnnnnnnnnnnnnnnnnnnnnnnnnnnnnnnnnnnnnnnnnnnnnnnnnnnnnnnnnnnnnnnnnnnnnnnnnnnnnnnnnnnnnnnnnnnnnnnnnnnnnnnnnnnnnnnnnnnnnnnnnnnnnnnnnnnnnnnnnnnnnnnnnnnnnnnnnnnnnnnnnnnnnnnnnnnnnnnnnnnnnnnnnnnnnnnnnnnnnnnnnnnnnnnnnnnnnnnnnnnnnnnnnnnnnnnnnnnnnnnnnnnnnnnnnnnnnnnnnnnnnnnnnnnnnnnnnnnnnnnnnnnnnnnnnnnnnnnnnnnnnnnnnnnnnnnnnnnnnnnnnnnnnnnnnnnnnnnnnnnnnnnnnnnnnnnnnnnnnnnnnnnnnnnnnnnnnnnnnnnnnnnnnnnnnnnnnnnnnnnnnnnnnnnnnnnnnnnnnnnnnnnnnnnnnnnnnnnnnnnnnnnnnnnnnnnnnnnnnnnnnnnnnnnnnnnnnnnnnnnnnnnnnnnnnnnnnnnnnnnnnnnnnnnnnnnnnnnnnnnnnnnnnnnnnnnnnnnnnnnnnnnnnnnnnnnnnnnnnnnnnnnnnnnnnnnnnnnnnnnnnnnnnnnnnnnnnnnnnnnnnnnnnnnnnnnnnnnnnnnnnnnnnnnnnnnnnnnnnnnnnnnnnnnnnnnnnnnnnnnnnnnnnnnnnnnnnnnnnnnnnnnnnnnnnnnnnnnnnnnnnnnnnnnnnnnnnnnnnnnnnnnnnnnnnnnnnnnnnnnnnnnnnnnnnnnnnnnnnnnnnnnnnnnnnnnnnnnnnnnnnnnnnnnnnnnnnnnnnnnnnnnnnnnnnnnnnnnnnnnnnnnnnnnnnnnnnnnnnnnnnnnnnnnnnnnnnnnnnnnnnnnnnnnnnnnnnnnnnnnnnnnnnnnnnnnnnnnnnnnnnnnnnnnnnnnnnnnnnnnnnnnnnnnnnnnnnnnnnnnnnnnnnnnnnnnnnnnnnnnnnnnnnnnnnnnnnnnnnnnnnnnnnnnnnnnnnnnnnnnnnnnnnnnnnnnnnnnnnnnnnnnnnnnnnnnnnnnnnnnnnnnnnnnnnnnnnnnnnnnnnnnnnnnnnnnnnnnnnnnnnnnnnnnnnnnnnnnnnnnnnnnnnnnnnnnnnnnnnnnnnnnnnnnnnnnnnnnnnnnnnnnnnnnnnnnnnnnnnnnnnnnnnnnnnnnnnnnnnnnnnnnnnnnnnnnnnnnnnnnnnnnnnnnnnnnnnnnnnnnnnnnnnnnnnnnnnnnnnnnnnnnnnnnnnnnnnnnnnnnnnnnnnnnnnnnnnnnnnnnnnnnnnnnnnnnnnnnnnnnnnnnnnnnnnnnnnnnnnnnnnnnnnnnnnnnnnnnnnnnnnnnnnnnnnnnnnnnnnnnnnnnnnnnnnnnnnnnnnnnnnnnnnnnnnnnnnnnnnnnnnnnnnnnnnnnnnnnnnnnnnnnnnnnnnnnnnnnnnnnnnnnnnnnnnnnnnnnnnnnnnnnnnnnnnnnnnnnnnnnnnnnnnnnnnnnnnnnnnnnnnnnnnnnnnnnnnnnnnnnnnnnnnnnnnnnnnnnnnnnnnnnnnnnnnnnnnnnnnnnnnnnnnnnnnnnnnnnnnnnnnnnnnnnnnnnnnnnnnnnnnnnnnnnnnnnnnnnnnnnnnnnnnnnnnnnnnnnnnnnnnnnnnnnnnnnnnnnnnnnnnnnnnnnnnnnnnnnnnnnnnnnnnnnnnnnnnnnnnnnnnnnnnnnnnnnnnnnnnnnnnnnnnnnnnnnnnnnnnnnnnnnnnnnnnnnnnnnnnnnnnnnnnnnnnnnnnnnnnnnnnnnnnnnnnnnnnnnnnnnnnnnnnnnnnnnnnnnnnnnnnnnnnnnnnnnnnnnnnnnnnnnnnnnnnnnnnnnnnnnnnnnnnnnnnnnnnnnnnnnnnnnnnnnnnnnnnnnnnnnnnnnnnnnnnnnnnnnnnnnnnnnnnnnnnnnnnnnnnnnnnnnnnnnnnnnnnnnnnnnnnnnnnnnnnnnnnnnnnnnnnnnnnnnnnnnnnnnnnnnnnnnnnnnnnnnnnnnnnnnnnnnnnnnnnnnnnnnnnnnnnnnnnnnnnnnnnnnnnnnnnnnnnnnnnnnnnnnnnnnnnnnnnnnnnnnnnnnnnnnnnnnnnnnnnnnnnnnnnnnnnnnnnnnnnnnnnnnnnnnnnnnnnnnnnnnnnnnnnnnnnnnnnnnnnnnnnnnnnnnnnnnnnnnnnnnnnnnnnnnnnnnnnnnnnnnnnnnnnnnnnnnnnnnnnnnnnnnnnnnnnnnnnnnnnnnnnnnnnnnnnnnnnnnnnnnnnnnnnnnnnnnnnnnnnnnnnnnnnnnnnnnnnnnnnnnnnnnnnnnnnnnnnnnnnnnnnnnnnnnnnnnnnnnnnnnnnnnnnnnnnnnnnnnnnnnnnnnnnnnnnnnnnnnnnnnnnnnnnnnnnnnnnnnnnnnnnnnnnnnnnnnnnnnnnnnnnnnnnnnnnnnnnnnnnnnnnnnnnnnnnnnnnnnnnnnnnnnnnnnnnnnnnnnnnnnnnnnnnnnnnnnnnnnnnnnnnnnnnnnnnnnnnnnnnnnnnnnnnnnnnnnnnnnnnnnnnnnnnnnnnnnnnnnnnnnnnnnnnnnnnnnnnnnnnnnnnnnnnnnnnnnnnnnnnnnnnnnnnnnnnnnnnnnnnnnnnnnnnnnnnnnnnnnnnnnnnnnnnnnnnnnnnnnnnnnnnnnnnnnnnnnnnnnnnnnnnnnnnnnnnnnnnnnnnnnnnnnnnnnnnnnnnnnnnnnnnnnnnnnnnnnnnnnnnnnnnnnnnnnnnnnnnnnnnnnnnnnnnnnnnnnnnnnnnnnnnnnnnnnnnnnnnnnnnnnnnnnnnnnnnnnnnnnnnnnnnnnnnnnnnnnnnnnnnnnnnnnnnnnnnnnnnnnnnnnnnnnnnnnnnnnnnnnnnnnnnnnnnnnnnnnnnnnnnnnnnnnnnnnnnnnnnnnnnnnnnnnnnnnnnnnnnnnnnnnnnnnnnnnnnnnnnnnnnnnnnnnnnnnnnnnnnnnnnnnnnnnnnnnnnnnnnnnnnnnnnnnnnnnnnnnnnnnnnnnnnnnnnnnnnnnnnnnnnnnnnnnnnnnnnnnnnnnnnnnnnnnnnnnnnnnnnnnnnnnnnnnnnnnnnnnnnnnnnnnnnnnnnnnnnnnnnnnnnnnnnnnnnnnnnnnnnnnnnnnnnnnnnnnnnnnnnnnnnnnnnnnnnnnnnnnnnnnnnnnnnnnnnnnnnnnnnnnnnnnnnnnnnnnnnnnnnnnnnnnnnnnnnnnnnnnnnnnnnnnnnnnnnnnnnnnnnnnnnnnnnnnnnnnnnnnnnnnnnnnnnnnnnnnnnnnnnnnnnnnnnnnnnnnnnnnnnnnnnnnnnnnnnnnnnnnnnnnnnnnnnnnnnnnnnnnnnnnnnnnnnnnnnnnnnnnnnnnnnnnnnnnnnnnnnnnnnnnnnnnnnnnnnnnnnnnnnnnnnnnnnnnnnnnnnnnnnnnnnnnnnnnnnnnnnnnnnnnnnnnnnnnnnnnnnnnnnnnnnnnnnnnnnnnnnnnnnnnnnnnnnnnnnnnnnnnnnnnnnnnnnnnnnnnnnnnnnnnnnnnnnnnnnnnnnnnnnnnnnnnnnnnnnnnnnnnnnnnnnnnnnnnnnnnnnnnnnnnnnnnnnnnnnnnnnnnnnnnnnnnnnnnnnnnnnnnnnnnnnnnnnnnnnnnnnnnnnnnnnnnnnnnnnnnnnnnnnnnnnnnnnnnnnnnnnnnnnnnnnnnnnnnnnnnnnnnnnnnnnnnnnnnnnnnnnnnnnnnnnnnnnnnnnnnnnnnnnnnnnnnnnnnnnnnnnnnnnnnnnnnnnnnnnnnnnnnnnnnnnnnnnnnnnnnnnnnnnnnnnnnnnnnnnnnnnnnnnnnnnnnnnnnnnnnnnnnnnnnnnnnnnnnnnnnnnnnnnnnnnnnnnnnnnnnnnnnnnnnnnnnnnnnnnnnnnnnnnnnnnnnnnnnnnnnnnnnnnnnnnnnnnnnnnnnnnnnnnnnnnnnnnnnnnnnnnnnnnnnnnnnnnnnnnnnnnnnnnnnnnnnnnnnnnnnnnnnnnnnnnnnnnnnnnnnnnnnnnnnnnnnnnnnnnnnnnnnnnnnnnnnnnnnnnnnnnnnnnnnnnnnnnnnnnnnnnnnnnnnnnnnnnnnnnnnnnnnnnnnnnnnnnnnnnnnnnnnnnnnnnnnnnnnnnnnnnnnnnnnnnnnnnnnnnnnnnnnnnnnnnnnnnnnnnnnnnnnnnnnnnnnnnnnnnnnnnnnnnnnnnnnnnnnnnnnnnnnnnnnnnnnnnnnnnnnnnnnnnnnnnnnnnnnnnnnnnnnnnnnnnnnnnnnnnnnnnnnnnnnnnnnnnnnnnnnnnnnnnnnnnnnnnnnnnnnnnnnnnnnnnnnnnnnnnnnnnnnnnnnnnnnnnnnnnnnnnnnnnnnnnnnnnnnnnnnnnnnnnnnnnnnnnnnnnnnnnnnnnnnnnnnnnnnnnnnnnnnnnnnnnnnnnnnnnnnnnnnnnnnnnnnnnnnnnnnnnnnnnnnnnnnnnnnnnnnnnnnnnnnnnnnnnnnnnnnnnnnnnnnnnnnnnnnnnnnnnnnnnnnnnnnnnnnnnnnnnnnnnnnnnnnnnnnnnnnnnnnnnnnnnnnnnnnnnnnnnnnnnnnnnnnnnnnnnnnnnnnnnnnnnnnnnnnnnnnnnnnnnnnnnnnnnnnnnnnnnnnnnnnnnnnnnnnnnnnnnnnnnnnnnnnnnnnnnnnnnnnnnnnnnnnnnnnnnnnnnnnnnnnnnnnnnnnnnnnnnnnnnnnnnnnnnnnnnnnnnnnnnnnnnnnnnnnnnnnnnnnnnnnnnnnnnnnnnnnnnnnnnnnnnnnnnnnnnnnnnnnnnnnnnnnnnnnnnnnnnnnnnnnnnnnnnnnnnnnnnnnnnnnnnnnnnnnnnnnnnnnnnnnnnnnnnnnnnnnnnnnnnnnnnnnnnnnnnnnnnnnnnnnnnnnnnnnnnnnnnnnnnnnnnnnnnnnnnnnnnnnnnnnnnnnnnnnnnnnnnnnnnnnnnnnnnnnnnnnnnnnnnnnnnnnnnnnnnnnnnnnnnnnnnnnnnnnnnnnnnnnnnnnnnnnnnnnnnnnnnnnnnnnnnnnnnnnnnnnnnnnnnnnnnnnnnnnnnnnnnnnnnnnnnnnnnnnnnnnnnnnnnnnnnnnnnnnnnnnnnnnnnnnnnnnnnnnnnnnnnnnnnnnnnnnnnnnnnnnnnnnnnnnnnnnnnnnnnnnnnnnnnnnnnnnnnnnnnnnnnnnnnnnnnnnnnnnnnnnnnnnnnnnnnnnnnnnnnnnnnnnnnnnnnnnnnnnnnnnnnnnnnnnnnnnnnnnnnnnnnnnnnnnnnnnnnnnnnnnnnnnnnnnnnnnnnnnnnnnnnnnnnnnnnnnnnnnnnnnnnnnnnnnnnnnnnnnnnnnnnnnnnnnnnnnnnnnnnnnnnnnnnnnnnnnnnnnnnnnnnnnnnnnnnnnnnnnnnnnnnnnnnnnnnnnnnnnnnnnnnnnnnnnnnnnnnnnnnnnnnnnnnnnnnnnnnnnnnnnnnnnnnnnnnnnnnnnnnnnnnnnnnnnnnnnnnnnnnnnnnnnnnnnnnnnnnnnnnnnnnnnnnnnnnnnnnnnnnnnnnnnnnnnnnnnnnnnnnnnnnnnnnnnnnnnnnnnnnnnnnnnnnnnnnnnnnnnnnnnnnnnnnnnnnnnnnnnnnnnnnnnnnnnnnnnnnnnnnnnnnnnnnnnnnnnnnnnnnnnnnnnnnnnnnnnnnnnnnnnnnnnnnnnnnnnnnnnnnnnnnnnnnnnnnnnnnnnnnnnnnnnnnnnnnnnnnnnnnnnnnnnnnnnnnnnnnnnnnnnnnnnnnnnnnnnnnnnnnnnnnnnnnnnnnnnnnnnnnnnnnnnnnnnnnnnnnnnnnnnnnnnnnnnnnnnnnnnnnnnnnnnnnnnnnnnnnnnnnnnnnnnnnnnnnnnnnnnnnnnnnnnnnnnnnnnnnnnnnnnnnnnnnnnnnnnnnnnnnnnnnnnnnnnnnnnnnnnnnnnnnnnnnnnnnnnnnnnnnnnnnnnnnnnnnnnnnnnnnnnnnnnnnnnnnnnnnnnnnnnnnnnnnnnnnnnnnnnnnnnnnnnnnnnnnnnnnnnnnnnnnnnnnnnnnnnnnnnnnnnnnnnnnnnnnnnnnnnnnnnnnnnnnnnnnnnnnnnnnnnnnnnnnnnnnnnnnnnnnnnnnnnnnnnnnnnnnnnnnnnnnnnnnnnnnnnnnnnnnnnnnnnnnnnnnnnnnnnnnnnnnnnnnnnnnnnnnnnnnnnnnnnnnnnnnnnnnnnnnnnnnnnnnnnnnnnnnnnnnnnnnnnnnnnnnnnnnnnnnnnnnnnnnnnnnnnnnnnnnnnnnnnnnnnnnnnnnnnnnnnnnnnnnnnnnnnnnnnnnnnnnnnnnnnnnnnnnnnnnnnnnnnnnnnnnnnnnnnnnnnnnnnnnnnnnnnnnnnnnnnnnnnnnnnnnnnnnnnnnnnnnnnnnnnnnnnnnnnnnnnnnnnnnnnnnnnnnnnnnnnnnnnnnnnnnnnnnnnnnnnnnnnnnnnnnnnnnnnnnnnnnnnnnnnnnnnnnnnnnnnnnnnnnnnnnnnnnnnnnnnnnnnnnnnnnnnnnnnnnnnnnnnnnnnnnnnnnnnnnnnnnnnnnnnnnnnnnnnnnnnnnnnnnnnnnnnnnnnnnnnnnnnnnnnnnnnnnnnnnnnnnnnnnnnnnnnnnnnnnnnnnnnnnnnnnnnnnnnnnnnnnnnnnnnnnnnnnnnnnnnnnnnnnnnnnnnnnnnnnnnnnnnnnnnnnnnnnnnnnnnnnnnnnnnnnnnnnnnnnnnnnnnnnnnnnnnnnnnnnnnnnnnnnnnnnnnnnnnnnnnnnnnnnnnnnnnnnnnnnnnnnnnnnnnnnnnnnnnnnnnnnnnnnnnnnnnnnnnnnnnnnnnnnnnnnnnnnnnnnnnnnnnnnnnnnnnnnnnnnnnnnnnnnnnnnnnnnnnnnnnnnnnnnnnnnnnnnnnnnnnnnnnnnnnnnnnnnnnnnnnnnnnnnnnnnnnnnnnnnnnnnnnnnnnnnnnnnnnnnnnnnnnnnnnnnnnnnnnnnnnnnnnnnnnnnnnnnnnnnnnnnnnnnnnnnnnnnnnnnnnnnnnnnnnnnnnnnnnnnnnnnnnnnnnnnnnnnnnnnnnnnnnnnnnnnnnnnnnnnnnnnnnnnnnnnnnnnnnnnnnnnnnnnnnnnnnnnnnnnnnnnnnnnnnnnnnnnnnnnnnnnnnnnnnnnnnnnnnnnnnnnnnnnnnnnnnnnnnnnnnnnnnnnnnnnnnnnnnnnnnnnnnnnnnnnnnnnnnnnnnnnnnnnnnnnnnnnnnnnnnnnnnnnnnnnnnnnnnnnnnnnnnnnnnnnnnnnnnnnnnnnnnnnnnnnnnnnnnnnnnnnnnnnnnnnnnnnnnnnnnnnnnnnnnnnnnnnnnnnnnnnnnnnnnnnnnnnnnnnnnnnnnnnnnnnnnnnnnnnnnnnnnnnnnnnnnnnnnnnnnnnnnnnnnnnnnnnnnnnnnnnnnnnnnnnnnnnnnnnnnnnnnnnnnnnnnnnnnnnnnnnnnnnnnnnnnnnnnnnnnnnnnnnnnnnnnnnnnnnnnnnnnnnnnnnnnnnnnnnnnnnnnnnnnnnnnnnnnnnnnnnnnnnnnnnnnnnnnnnnnnnnnnnnnnnnnnnnnnnnnnnnnnnnnnnnnnnnnnnnnnnnnnnnnnnnnnnnnnnnnnnnnnnnnnnnnnnnnnnnnnnnnnnnnnnnnnnnnnnnnnnnnnnnnnnnnnnnnnnnnnnnnnnnnnnnnnnnnnnnnnnnnnnnnnnnnnnnnnnnnnnnnnnnnnnnnnnnnnnnnnnnnnnnnnnnnnnnnnnnnnnnnnnnnnnnnnnnnnnnnnnnnnnnnnnnnnnnnnnnnnnnnnnnnnnnnnnnnnnnnnnnnnnnnnnnnnnnnnnnnnnnnnnnnnnnnnnnnnnnnnnnnnnnnnnnnnnnnnnnnnnnnnnnnnnnnnnnnnnnnnnnnnnnnnnnnnnnnnnnnnnnnnnnnnnnnnnnnnnnnnnnnnnnnnnnnnnnnnnnnnnnnnnnnnnnnnnnnnnnnnnnnnnnnnnnnnnnnnnnnnnnnnnnnnnnnnnnnnnnnnnnnnnnnnnnnnnnnnnnnnnnnnnnnnnnnnnnnnnnnnnnnnnnnnnnnnnnnnnnnnnnnnnnnnnnnnnnnnnnnnnnnnnnnnnnnnnnnnnnnnnnnnnnnnnnnnnnnnnnnnnnnnnnnnnnnnnnnnnnnnnnnnnnnnnnnnnnnnnnnnnnnnnnnnnnnnnnnnnnnnnnnnnnnnnnnnnnnnnnnnnnnnnnnnnnnnnnnnnnnnnnnnnnnnnnnnnnnnnnnnnnnnnnnnnnnnnnnnnnnnnnnnnnnnnnnnnnnnnnnnnnnnnnnnnnnnnnnnnnnnnnnnnnnnnnnnnnnnnnnnnnnnnnnnnnnnnnnnnnnnnnnnnnnnnnnnnnnnnnnnnnnnnnnnnnnnnnnnnnnnnnnnnnnnnnnnnnnnnnnnnnnnnnnnnnnnnnnnnnnnnnnnnnnnnnnnnnnnnnnnnnnnnnnnnnnnnnnnnnnnnnnnnnnnnnnnnnnnnnnnnnnnnnnnnnnnnnnnnnnnnnnnnnnnnnnnnnnnnnnnnnnnnnnnnnnnnnnnnnnnnnnnnnnnnnnnnnnnnnnnnnnnnnnnnnnnnnnnnnnnnnnnnnnnnnnnnnnnnnnnnnnnnnnnnnnnnnnnnnnnnnnnnnnnnnnnnnnnnnnnnnnnnnnnnnnnnnnnnnnnnnnnnnnnnnnnnnnnnnnnnnnnnnnnnnnnnnnnnnnnnnnnnnnnnnnnnnnnnnnnnnnnnnnnnnnnnnnnnnnnnnnnnnnnnnnnnnnnnnnnnnnnnnnnnnnnnnnnnnnnnnnnnnnnnnnnnnnnnnnnnnnnnnnnnnnnnnnnnnnnnnnnnnnnnnnnnnnnnnnnnnnnnnnnnnnnnnnnnnnnnnnnnnnnnnnnnnnnnnnnnnnnnnnnnnnnnnnnnnnnnnnnnnnnnnnnnnnnnnnnnnnnnnnnnnnnnnnnnnnnnnnnnnnnnnnnnnnnnnnnnnnnnnnnnnnnnnnnnnnnnnnnnnnnnnnnnnnnnnnnnnnnnnnnnnnnnnnnnnnnnnnnnnnnnnnnnnnnnnnnnnnnnnnnnnnnnnnnnnnnnnnnnnnnnnnnnnnnnnnnnnnnnnnnnnnnnnnnnnnnnnnnnnnnnnnnnnnnnnnnnnnnnnnnnnnnnnnnnnnnnnnnnnnnnnnnnnnnnnnnnnnnnnnnnnnnnnnnnnnnnnnnnnnnnnnnnnnnnnnnnnnnnnnnnnnnnnnnnnnnnnnnnnnnnnnnnnnnnnnnnnnnnnnnnnnnnnnnnnnnnnnnnnnnnnnnnnnnnnnnnnnnnnnnnnnnnnnnnnnnnnnnnnnnnnnnnnnnnnnnnnnnnnnnnnnnnnnnnnnnnnnnnnnnnnnnnnnnnnnnnnnnnnnnnnnnnnnnnnnnnnnnnnnnnnnnnnnnnnnnnnnnnnnnnnnnnnnnnnnnnnnnnnnnnnnnnnnnnnnnnnnnnnnnnnnnnnnnnnnnnnnnnnnnnnnnnnnnnnnnnnnnnnnnnnnnnnnnnnnnnnnnnnnnnnnnnnnnnnnnnnnnnnnnnnnnnnnnnnnnnnnnnnnnnnnnnnnnnnnnnnnnnnnnnnnnnnnnnnnnnnnnnnnnnnnnnnnnnnnnnnnnnnnnnnnnnnnnnnnnnnnnnnnnnnnnnnnnnnnnnnnnnnnnnnnnnnnnnnnnnnnnnnnnnnnnnnnnnnnnnnnnnnnnnnnnnnnnnnnnnnnnnnnnnnnnnnnnnnnnnnnnnnnnnnnnnnnnnnnnnnnnnnnnnnnnnnnnnnnnnnnnnnnnnnnnnnnnnnnnnnnnnnnnnnnnnnnnnnnnnnnnnnnnnnnnnnnnnnnnnnnnnnnnnnnnnnnnnnnnnnnnnnnnnnnnnnnnnnnnnnnnnnnnnnnnnnnnnnnnnnnnnnnnnnnnnnnnnnnnnnnnnnnnnnnnnnnnnnnnnnnnnnnnnnnnnnnnnnnnnnnnnnnnnnnnnnnnnnnnnnnnnnnnnnnnnnnnnnnnnnnnnnnnnnnnnnnnnnnnnnnnnnnnnnnnnnnnnnnnnnnnnnnnnnnnnnnnnnnnnnnnnnnnnnnnnnnnnnnnnnnnnnnnnnnnnnnnnnnnnnnnnnnnnnnnnnnnnnnnnnnnnnnnnnnnnnnnnnnnnnnnnnnnnnnnnnnnnnnnnnnnnnnnnnnnnnnnnnnnnnnnnnnnnnnnnnnnnnnnnnnnnnnnnnnnnnnnnnnnnnnnnnnnnnnnnnnnnnnnnnnnnnnnnnnnnnnnnnnnnnnnnnnnnnnnnnnnnnnnnnnnnnnnnnnnnnnnnnnnnnnnnnnnnnnnnnnnnnnnnnnnnnnnnnnnnnnnnnnnnnnnnnnnnnnnnnnnnnnnnnnnnnnnnnnnnnnnnnnnnnnnnnnnnnnnnnnnnnnnnnnnnnnnnnnnnnnnnnnnnnnnnnnnnnnnnnnnnnnnnnnnnnnnnnnnnnnnnnnnnnnnnnnnnnnnnnnnnnnnnnnnnnnnnnnnnnnnnnnnnnnnnnnnnnnnnnnnnnnnnnnnnnnnnnnnnnnnnnnnnnnnnnnnnnnnnnnnnnnnnnnnnnnnnnnnnnnnnnnnnnnnnnnnnnnnnnnnnnnnnnnnnnnnnnnnnnnnnnnnnnnnnnnnnnnnnnnnnnnnnnnnnnnnnnnnnnnnnnnnnnnnnnnnnnnnnnnnnnnnnnnnnnnnnnnnnnnnnnnnnnnnnnnnnnnnnnnnnnnnnnnnnnnnnnnnnnnnnnnnnnnnnnnnnnnnnnnnnnnnnnnnnnnnnnnnnnnnnnnnnnnnnnnnnnnnnnnnnnnnnnnnnnnnnnnnnnnnnnnnnnnnnnnnnnnnnnnnnnnnnnnnnnnnnnnnnnnnnnnnnnnnnnnnnnnnnnnnnnnnnnnnnnnnnnnnnnnnnnnnnnnnnnnnnnnnnnnnnnnnnnnnnnnnnnnnnnnnnnnnnnnnnnnnnnnnnnnnnnnnnnnnnnnnnnnnnnnnnnnnnnnnnnnnnnnnnnnnnnnnnnnnnnnnnnnnnnnnnnnnnnnnnnnnnnnnnnnnnnnnnnnnnnnnnnnnnnnnnnnnnnnnnnnnnnnnnnnnnnnnnnnnnnnnnnnnnnnnnnnnnnnnnnnnnnnnnnnnnnnnnnnnnnnnnnnnnnnnnnnnnnnnnnnnnnnnnnnnnnnnnnnnnnnnnnnnnnnnnnnnnnnnnnnnnnnnnnnnnnnnnnnnnnnnnnnnnnnnnnnnnnnnnnnnnnnnnnnnnnnnnnnnnnnnnnnnnnnnnnnnnnnnnnnnnnnnnnnnnnnnnnnnnnnnnnnnnnnnnnnnnnnnnnnnnnnnnnnnnnnnnnnnnnnnnnnnnnnnnnnnnnnnnnnnnnnnnnnnnnnnnnnnnnnnnnnnnnnnnnnnnnnnnnnnnnnnnnnnnnnnnnnnnnnnnnnnnnnnnnnnnnnnnnnnnnnnnnnnnnnnnnnnnnnnnnnnnnnnnnnnnnnnnnnnnnnnnnnnnnnnnnnnnnnnnnnnnnnnnnnnnnnnnnnnnnnnnnnnnnnnnnnnnnnnnnnnnnnnnnnnnnnnnnnnnnnnnnnnnnnnnnnnnnnnnnnnnnnnnnnnnnnnnnnnnnnnnnnnnnnnnnnnnnnnnnnnnnnnnnnnnnnnnnnnnnnnnnnnnnnnnnnnnnnnnnnnnnnnnnnnnnnnnnnnnnnnnnnnnnnnnnnnnnnnnnnnnnnnnnnnnnnnnnnnnnnnnnnnnnnnnnnnnnnnnnnnnnnnnnnnnnnnnnnnnnnnnnnnnnnnnnnnnnnnnnnnnnnnnnnnnnnnnnnnnnnnnnnnnnnnnnnnnnnnnnnnnnnnnnnnnnnnnnnnnnnnnnnnnnnnnnnnnnnnnnnnnnnnnnnnnnnnnnnnnnnnnnnnnnnnnnnnnnnnnnnnnnnnnnnnnnnnnnnnnnnnnnnnnnnnnnnnnnnnnnnnnnnnnnnnnnnnnnnnnnnnnnnnnnnnnnnnnnnnnnnnnnnnnnnnnnnnnnnnnnnnnnnnnnnnnnnnnnnnnnnnnnnnnnnnnnnnnnnnnnnnnnnnnnnnnnnnnnnnnnnnnnnnnnnnnnnnnnnnnnnnnnnnnnnnnnnnnnnnnnnnnnnnnnnnnnnnnnnnnnnnnnnnnnnnnnnnnnnnnnnnnnnnnnnnnnnnnnnnnnnnnnnnnnnnnnnnnnnnnnnnnnnnnnnnnnnnnnnnnnnnnnnnnnnnnnnnnnnnnnnnnnnnnnnnnnnnnnnnnnnnnnnnnnnnnnnnnnnnnnnnnnnnnnnnnnnnnnnnnnnnnnnnnnnnnnnnnnnnnnnnnnnnnnnnnnnnnnnnnnnnnnnnnnnnnnnnnnnnnnnnnnnnnnnnnnnnnnnnnnnnnnnnnnnnnnnnnnnnnnnnnnnnnnnnnnnnnnnnnnnnnnnnnnnnnnnnnnnnnnnnnnnnnnnnnnnnnnnnnnnnnnnnnnnnnnnnnnnnnnnnnnnnnnnnnnnnnnnnnnnnnnnnnnnnnnnnnnnnnnnnnnnnnnnnnnnnnnnnnnnnnnnnnnnnnnnnnnnnnnnnnnnnnnnnnnnnnnnnnnnnnnnnnnnnnnnnnnnnnnnnnnnnnnnnnnnnnnnnnnnnnnnnnnnnnnnnnnnnnnnnnnnnnnnnnnnnnnnnnnnnnnnnnnnnnnnnnnnnnnnnnnnnnnnnnnnnnnnnnnnnnnnnnnnnnnnnnnnnnnnnnnnnnnnnnnnnnnnnnnnnnnnnnnnnnnnnnnnnnnnnnnnnnnnnnnnnnnnnnnnnnnnnnnnnnnnnnnnnnnnnnnnnnnnnnnnnnnnnnnnnnnnnnnnnnnnnnnnnnnnnnnnnnnnnnnnnnnnnnnnnnnnnnnnnnnnnnnnnnnnnnnnnnnnnnnnnnnnnnnnnnnnnnnnnnnnnnnnnnnnnnnnnnnnnnnnnnnnnnnnnnnnnnnnnnnnnnnnnnnnnnnnnnnnnnnnnnnnnnnnnnnnnnnnnnnnnnnnnnnnnnnnnnnnnnnnnnnnnnnnnnnnnnnnnnnnnnnnnnnnnnnnnnnnnnnnnnnnnnnnnnnnnnnnnnnnnnnnnnnnnnnnnnnnnnnnnnnnnnnnnnnnnnnnnnnnnnnnnnnnnnnnnnnnnnnnnnnnnnnnnnnnnnnnnnnnnnnnnnnnnnnnnnnnnnnnnnnnnnnnnnnnnnnnnnnnnnnnnnnnnnnnnnnnnnnnnnnnnnnnnnnnnnnnnnnnnnnnnnnnnnnnnnnnnnnnnnnnnnnnnnnnnnnnnnnnnnnnnnnnnnnnnnnnnnnnnnnnnnnnnnnnnnnnnnnnnnnnnnnnnnnnnnnnnnnnnnnnnnnnnnnnnnnnnnnnnnnnnnnnnnnnnnnnnnnnnnnnnnnnnnnnnnnnnnnnnnnnnnnnnnnnnnnnnnnnnnnnnnnnnnnnnnnnnnnnnnnnnnnnnnnnnnnnnnnnnnnnnnnnnnnnnnnnnnnnnnnnnnnnnnnnnnnnnnnnnnnnnnnnnnnnnnnnnnnnnnnnnnnnnnnnnnnnnnnnnnnnnnnnnnnnnnnnnnnnnnnnnnnnnnnnnnnnnnnnnnnnnnnnnnnnnnnnnnnnnnnnnnnnnnnnnnnnnnnnnnnnnnnnnnnnnnnnnnnnnnnnnnnnnnnnnnnnnnnnnnnnnnnnnnnnnnnnnnnnnnnnnnnnnnnnnnnnnnnnnnnnnnnnnnnnnnnnnnnnnnnnnnnnnnnnnnnnnnnnnnnnnnnnnnnnnnnnnnnnnnnnnnnnnnnnnnnnnnnnnnnnnnnnnnnnnnnnnnnnnnnnnnnnnnnnnnnnnnnnnnnnnnnnnnnnnnnnnnnnnnnnnnnnnnnnnnnnnnnnnnnnnnnnnnnnnnnnnnnnnnnnnnnnnnnnnnnnnnnnnnnnnnnnnnnnnnnnnnnnnnnnnnnnnnnnnnnnnnnnnnnnnnnnnnnnnnnnnnnnnnnnnnnnnnnnnnnnnnnnnnnnnnnnnnnnnnnnnnnnnnnnnnnnnnnnnnnnnnnnnnnnnnnnnnnnnnnnnnnnnnnnnnnnnnnnnnnnnnnnnnnnnnnnnnnnnnnnnnnnnnnnnnnnnnnnnnnnnnnnnnnnnnnnnnnnnnnnnnnnnnnnnnnnnnnnnnnnnnnnnnnnnnnnnnnnnnnnnnnnnnnnnnnnnnnnnnnnnnnnnnnnnnnnnnnnnnnnnnnnnnnnnnnnnnnnnnnnnnnnnnnnnnnnnnnnnnnnnnnnnnnnnnnnnnnnnnnnnnnnnnnnnnnnnnnnnnnnnnnnnnnnnnnnnnnnnnnnnnnnnnnnnnnnnnnnnnnnnnnnnnnnnnnnnnnnnnnnnnnnnnnnnnnnnnnnnnnnnnnnnnnnnnnnnnnnnnnnnnnnnnnnnnnnnnnnnnnnnnnnnnnnnnnnnnnnnnnnnnnnnnnnnnnnnnnnnnnnnnnnnnnnnnnnnnnnnnnnnnnnnnnnnnnnnnnnnnnnnnnnnnnnnnnnnnnnnnnnnnnnnnnnnnnnnnnnnnnnnnnnnnnnnnnnnnnnnnnnnnnnnnnnnnnnnnnnnnnnnnnnnnnnnnnnnnnnnnnnnnnnnnnnnnnnnnnnnnnnnnnnnnnnnnnnnnnnnnnnnnnnnnnnnnnnnnnnnnnnnnnnnnnnnnnnnnnnnnnnnnnnnnnnnnnnnnnnnnnnnnnnnnnnnnnnnnnnnnnnnnnnnnnnnnnnnnnnnnnnnnnnnnnnnnnnnnnnnnnnnnnnnnnnnnnnnnnnnnnnnnnnnnnnnnnnnnnnnnnnnnnnnnnnnnnnnnnnnnnnnnnnnnnnnnnnnnnnnnnnnnnnnnnnnnnnnnnnnnnnnnnnnnnnnnnnnnnnnnnnnnnnnnnnnnnnnnnnnnnnnnnnnnnnnnnnnnnnnnnnnnnnnnnnnnnnnnnnnnnnnnnnnnnnnnnnnnnnnnnnnnnnnnnnnnnnnnnnnnnnnnnnnnnnnnnnnnnnnnnnnnnnnnnnnnnnnnnnnnnnnnnnnnnnnnnnnnnnnnnnnnnnnnnnnnnnnnnnnnnnnnnnnnnnnnnnnnnnnnnnnnnnnnnnnnnnnnnnnnnnnnnnnnnnnnnnnnnnnnnnnnnnnnnnnnnnnnnnnnnnnnnnnnnnnnnnnnnnnnnnnnnnnnnnnnnnnnnnnnnnnnnnnnnnnnnnnnnnnnnnnnnnnnnnnnnnnnnnnnnnnnnnnnnnnnnnnnnnnnnnnnnnnnnnnnnnnnnnnnnnnnnnnnnnnnnnnnnnnnnnnnnnnnnnnnnnnnnnnnnnnnnnnnnnnnnnnnnnnnnnnnnnnnnnnnnnnnnnnnnnnnnnnnnnnnnnnnnnnnnnnnnnnnnnnnnnnnnnnnnnnnnnnnnnnnnnnnnnnnnnnnnnnnnnnnnnnnnnnnnnnnnnnnnnnnnnnnnnnnnnnnnnnnnnnnnnnnnnnnnnnnnnnnnnnnnnnnnnnnnnnnnnnnnnnnnnnnnnnnnnnnnnnnnnnnnnnnnnnnnnnnnnnnnnnnnnnnnnnnnnnnnnnnnnnnnnnnnnnnnnnnnnnnnnnnnnnnnnnnnnnnnnnnnnnnnnnnnnnnnnnnnnnnnnnnnnnnnnnnnnnnnnnnnnnnnnnnnnnnnnnnnnnnnnnnnnnnnnnnnnnnnnnnnnnnnnnnnnnnnnnnnnnnnnnnnnnnnnnnnnnnnnnnnnnnnnnnnnnnnnnnnnnnnnnnnnnnnnnnnnnnnnnnnnnnnnnnnnnnnnnnnnnnnnnnnnnnnnnnnnnnnnnnnnnnnnnnnnnnnnnnnnnnnnnnnnnnnnnnnnnnnnnnnnnnnnnnnnnnnnnnnnnnnnnnnnnnnnnnnnnnnnnnnnnnnnnnnnnnnnnnnnnnnnnnnnnnnnnnnnnnnnnnnnnnnnnnnnnnnnnnnnnnnnnnnnnnnnnnnnnnnnnnnnnnnnnnnnnnnnnnnnnnnnnnnnnnnnnnnnnnnnnnnnnnnnnnnnnnnnnnnnnnnnnnnnnnnnnnnnnnnnnnnnnnnnnnnnnnnnnnnnnnnnnnnnnnnnnnnnnnnnnnnnnnnnnnnnnnnnnnnnnnnnnnnnnnnnnnnnnnnnnnnnnnnnnnnnnnnnnnnnnnnnnnnnnnnnnnnnnnnnnnnnnnnnnnnnnnnnnnnnnnnnnnnnnnnnnnnnnnnnnnnnnnnnnnnnnnnnnnnnnnnnnnnnnnnnnnnnnnnnnnnnnnnnnnnnnnnnnnnnnnnnnnnnnnnnnnnnnnnnnnnnnnnnnnnnnnnnnnnnnnnnnnnnnnnnnnnnnnnnnnnnnnnnnnnnnnnnnnnnnnnnnnnnnnnnnnnnnnnnnnnnnnnnnnnnnnnnnnnnnnnnnnnnnnnnnnnnnnnnnnnnnnnnnnnnnnnnnnnnnnnnnnnnnnnnnnnnnnnnnnnnnnnnnnnnnnnnnnnnnnnnnnnnnnnnnnnnnnnnnnnnnnnnnnnnnnnnnnnnnnnnnnnnnnnnnnnnnnnnnnnnnnnnnnnnnnnnnnnnnnnnnnnnnnnnnnnnnnnnnnnnnnnnnnnnnnnnnnnnnnnnnnnnnnnnnnnnnnnnnnnnnnnnnnnnnnnnnnnnnnnnnnnnnnnnnnnnnnnnnnnnnnnnnnnnnnnnnnnnnnnnnnnnnnnnnnnnnnnnnnnnnnnnnnnnnnnnnnnnnnnnnnnnnnnnnnnnnnnnnnnnnnnnnnnnnnnnnnnnnnnnnnnnnnnnnnnnnnnnnnnnnnnnnnnnnnnnnnnnnnnnnnnnnnnnnnnnnnnnnnnnnnnnnnnnnnnnnnnnnnnnnnnnnnnnnnnnnnnnnnnnnnnnnnnnnnnnnnnnnnnnnnnnnnnnnnnnnnnnnnnnnnnnnnnnnnnnnnnnnnnnnnnnnnnnnnnnnnnnnnnnnnnnnnnnnnnnnnnnnnnnnnnnnnnnnnnnnnnnnnnnnnnnnnnnnnnnnnnnnnnnnnnnnnnnnnnnnnnnnnnnnnnnnnnnnnnnnnnnnnnnnnnnnnnnnnnnnnnnnnnnnnnnnnnnnnnnnnnnnnnnnnnnnnnnnnnnnnnnnnnnnnnnnnnnnnnnnnnnnnnnnnnnnnnnnnnnnnnnnnnnnnnnnnnnnnnnnnnnnnnnnnnnnnnnnnnnnnnnnnnnnnnnnnnnnnnnnnnnnnnnnnnnnnnnnnnnnnnnnnnnnnnnnnnnnnnnnnnnnnnnnnnnnnnnnnnnnnnnnnnnnnnnnnnnnnnnnnnnnnnnnnnnnnnnnnnnnnnnnnnnnnnnnnnnnnnnnnnnnnnnnnnnnnnnnnnnnnnnnnnnnnnnnnnnnnnnnnnnnnnnnnnnnnnnnnnnnnnnnnnnnnnnnnnnnnnnnnnnnnnnnnnnnnnnnnnnnnnnnnnnnnnnnnnnnnnnnnnnnnnnnnnnnnnnnnnnnnnnnnnnnnnnnnnnnnnnnnnnnnnnnnnnnnnnnnnnnnnnnnnnnnnnnnnnnnnnnnnnnnnnnnnnnnnnnnnnnnnnnnnnnnnnnnnnnnnnnnnnnnnnnnnnnnnnnnnnnnnnnnnnnnnnnnnnnnnnnnnnnnnnnnnnnnnnnnnnnnnnnnnnnnnnnnnnnnnnnnnnnnnnnnnnnnnnnnnnnnnnnnnnnnnnnnnnnnnnnnnnnnnnnnnnnnnnnnnnnnnnnnnnnnnnnnnnnnnnnnnnnnnnnnnnnnnnnnnnnnnnnnnnnnnnnnnnnnnnnnnnnnnnnnnnnnnnnnnnnnnnnnnnnnnnnnnnnnnnnnnnnnnnnnnnnnnnnnnnnnnnnnnnnnnnnnnnnnnnnnnnnnnnnnnnnnnnnnnnnnnnnnnnnnnnnnnnnnnnnnnnnnnnnnnnnnnnnnnnnnnnnnnnnnnnnnnnnnnnnnnnnnnnnnnnnnnnnnnnnnnnnnnnnnnnnnnnnnnnnnnnnnnnnnnnnnnnnnnnnnnnnnnnnnnnnnnnnnnnnnnnnnnnnnnnnnnnnnnnnnnnnnnnnnnnnnnnnnnnnnnnnnnnnnnnnnnnnnnnnnnnnnnnnnnnnnnnnnnnnnnnnnnnnnnnnnnnnnnnnnnnnnnnnnnnnnnnnnnnnnnnnnnnnnnnnnnnnnnnnnnnnnnnnnnnnnnnnnnnnnnnnnnnnnnnnnnnnnnnnnnnnnnnnnnnnnnnnnnnnnnnnnnnnnnnnnnnnnnnnnnnnnnnnnnnnnnnnnnnnnnnnnnnnnnnnnnnnnnnnnnnnnnnnnnnnnnnnnnnnnnnnnnnnnnnnnnnnnnnnnnnnnnnnnnnnnnnnnnnnnnnnnnnnnnnnnnnnnnnnnnnnnnnnnnnnnnnnnnnnnnnnnnnnnnnnnnnnnnnnnnnnnnnnnnnnnnnnnnnnnnnnnnnnnnnnnnnnnnnnnnnnnnnnnnnnnnnnnnnnnnnnnnnnnnnnnnnnnnnnnnnnnnnnnnnnnnnnnnnnnnnnnnnnnnnnnnnnnnnnnnnnnnnnnnnnnnnnnnnnnnnnnnnnnnnnnnnnnnnnnnnnnnnnnnnnnnnnnnnnnnnnnnnnnnnnnnnnnnnnnnnnnnnnnnnnnnnnnnnnnnnnnnnnnnnnnnnnnnnnnnnnnnnnnnnnnnnnnnnnnnnnnnnnnnnnnnnnnnnnnnnnnnnnnnnnnnnnnnnnnnnnnnnnnnnnnnnnnnnnnnnnnnnnnnnnnnnnnnnnnnnnnnnnnnnnnnnnnnnnnnnnnnnnnnnnnnnnnnnnnnnnnnnnnnnnnnnnnnnnnnnnnnnnnnnnnnnnnnnnnnnnnnnnnnnnnnnnnnnnnnnnnnnnnnnnnnnnnnnnnnnnnnnnnnnnnnnnnnnnnnnnnnnnnnnnnnnnnnnnnnnnnnnnnnnnnnnnnnnnnnnnnnnnnnnnnnnnnnnnnnnnnnnnnnnnnnnnnnnnnnnnnnnnnnnnnnnnnnnnnnnnnnnnnnnnnnnnnnnnnnnnnnnnnnnnnnnnnnnnnnnnnnnnnnnnnnnnnnnnnnnnnnnnnnnnnnnnnnnnnnnnnnnnnnnnnnnnnnnnnnnnnnnnnnnnnnnnnnnnnnnnnnnnnnnnnnnnnnnnnnnnnnnnnnnnnnnnnnnnnnnnnnnnnnnnnnnnnnnnnnnnnnnnnnnnnnnnnnnnnnnnnnnnnnnnnnnnnnnnnnnnnnnnnnnnnnnnnnnnnnnnnnnnnnnnnnnnnnnnnnnnnnnnnnnnnnnnnnnnnnnnnnnnnnnnnnnnnnnnnnnnnnnnnnnnnnnnnnnnnnnnnnnnnnnnnnnnnnnnnnnnnnnnnnnnnnnnnnnnnnnnnnnnnnnnnnnnnnnnnnnnnnnnnnnnnnnnnnnnnnnnnnnnnnnnnnnnnnnnnnnnnnnnnnnnnnnnnnnnnnnnnnnnnnnnnnnnnnnnnnnnnnnnnnnnnnnnnnnnnnnnnnnnnnnnnnnnnnnnnnnnnnnnnnnnnnnnnnnnnnnnnnnnnnnnnnnnnnnnnnnnnnnnnnnnnnnnnnnnnnnnnnnnnnnnnnnnnnnnnnnnnnnnnnnnnnnnnnnnnnnnnnnnnnnnnnnnnnnnnnnnnnnnnnnnnnnnnnnnnnnnnnnnnnnnnnnnnnnnnnnnnnnnnnnnnnnnnnnnnnnnnnnnnnnnnnnnnnnnnnnnnnnnnnnnnnnnnnnnnnnnnnnnnnnnnnnnnnnnnnnnnnnnnnnnnnnnnnnnnnnnnnnnnnnnnnnnnnnnnnnnnnnnnnnnnnnnnnnnnnnnnnnnnnnnnnnnnnnnnnnnnnnnnnnnnnnnnnnnnnnnnnnnnnnnnnnnnnnnnnnnnnnnnnnnnnnnnnnnnnnnnnnnnnnnnnnnnnnnnnnnnnnnnnnnnnnnnnnnnnnnnnnnnnnnnnnnnnnnnnnnnnnnnnnnnnnnnnnnnnnnnnnnnnnnnnnnnnnnnnnnnnnnnnnnnnnnnnnnnnnnnnnnnnnnnnnnnnnnnnnnnnnnnnnnnnnnnnnnnnnnnnnnnnnnnnnnnnnnnnnnnnnnnnnnnnnnnnnnnnnnnnnnnnnnnnnnnnnnnnnnnnnnnnnnnnnnnnnnnnnnnnnnnnnnnnnnnnnnnnnnnnnnnnnnnnnnnnnnnnnnnnnnnnnnnnnnnnnnnnnnnnnnnnnnnnnnnnnnnnnnnnnnnnnnnnnnnnnnnnnnnnnnnnnnnnnnnnnnnnnnnnnnnnnnnnnnnnnnnnnnnnnnnnnnnnnnnnnnnnnnnnnnnnnnnnnnnnnnnnnnnnnnnnnnnnnnnnnnnnnnnnnnnnnnnnnnnnnnnnnnnnnnnnnnnnnnnnnnnnnnnnnnnnnnnnnnnnnnnnnnnnnnnnnnnnnnnnnnnnnnnnnnnnnnnnnnnnnnnnnnnnnnnnnnnnnnnnnnnnnnnnnnnnnnnnnnnnnnnnnnnnnnnnnnnnnnnnnnnnnnnnnnnnnnnnnnnnnnnnnnnnnnnnnnnnnnnnnnnnnnnnnnnnnnnnnnnnnnnnnnnnnnnnnnnnnnnnnnnnnnnnnnnnnnnnnnnnnnnnnnnnnnnnnnnnnnnnnnnnnnnnnnnnnnnnnnnnnnnnnnnnnnnnnnnnnnnnnnnnnnnnnnnnnnnnnnnnnnnnnnnnnnnnnnnnnnnnnnnnnnnnnnnnnnnnnnnnnnnnnnnnnnnnnnnnnnnnnnnnnnnnnnnnnnnnnnnnnnnnnnnnnnnnnnnnnnnnnnnnnnnnnnnnnnnnnnnnnnnnnnnnnnnnnnnnnnnnnnnnnnnnnnnnnnnnnnnnnnnnnnnnnnnnnnnnnnnnnnnnnnnnnnnnnnnnnnnnnnnnnnnnnnnnnnnnnnnnnnnnnnnnnnnnnnnnnnnnnnnnnnnnnnnnnnnnnnnnnnnnnnnnnnnnnnnnnnnnnnnnnnnnnnnnnnnnnnnnnnnnnnnnnnnnnnnnnnnnnnnnnnnnnnnnnnnnnnnnnnnnnnnnnnnnnnnnnnnnnnnnnnnnnnnnnnnnnnnnnnnnnnnnnnnnnnnnnnnnnnnnnnnnnnnnnnnnnnnnnnnnnnnnnnnnnnnnnnnnnnnnnnnnnnnnnnnnnnnnnnnnnnnnnnnnnnnnnnnnnnnnnnnnnnnnnnnnnnnnnnnnnnnnnnnnnnnnnnnnnnnnnnnnnnnnnnnnnnnnnnnnnnnnnnnnnnnnnnnnnnnnnnnnnnnnnnnnnnnnnnnnnnnnnnnnnnnnnnnnnnnnnnnnnnnnnnnnnnnnnnnnnnnnnnnnnnnnnnnnnnnnnnnnnnnnnnnnnnnnnnnnnnnnnnnnnnnnnnnnnnnnnnnnnnnnnnnnnnnnnnnnnnnnnnnnnnnnnnnnnnnnnnnnnnnnnnnnnnnnnnnnnnnnnnnnnnnnnnnnnnnnnnnnnnnnnnnnnnnnnnnnnnnnnnnnnnnnnnnnnnnnnnnnnnnnnnnnnnnnnnnnnnnnnnnnnnnnnnnnnnnnnnnnnnnnnnnnnnnnnnnnnnnnnnnnnnnnnnnnnnnnnnnnnnnnnnnnnnnnnnnnnnnnnnnnnnnnnnnnnnnnnnnnnnnnnnnnnnnnnnnnnnnnnnnnnnnnnnnnnnnnnnnnnnnnnnnnnnnnnnnnnnnnnnnnnnnnnnnnnnnnnnnnnnnnnnnnnnnnnnnnnnnnnnnnnnnnnnnnnnnnnnnnnnnnnnnnnnnnnnnnnnnnnnnnnnnnnnnnnnnnnnnnnnnnnnnnnnnnnnnnnnnnnnnnnnnnnnnnnnnnnnnnnnnnnnnnnnnnnnnnnnnnnnnnnnnnnnnnnnnnnnnnnnnnnnnnnnnnnnnnnnnnnnnnnnnnnnnnnnnnnnnnnnnnnnnnnnnnnnnnnnnnnnnnnnnnnnnnnnnnnnnnnnnnnnnnnnnnnnnnnnnnnnnnnnnnnnnnnnnnnnnnnnnnnnnnnnnnnnnnnnnnnnnnnnnnnnnnnnnnnnnnnnnnnnnnnnnnnnnnnnnnnnnnnnnnnnnnnnnnnnnnnnnnnnnnnnnnnnnnnnnnnnnnnnnnnnnnnnnnnnnnnnnnnnnnnnnnnnnnnnnnnnnnnnnnnnnnnnnnnnnnnnnnnnnnnnnnnnnnnnnnnnnnnnnnnnnnnnnnnnnnnnnnnnnnnnnnnnnnnnnnnnnnnnnnnnnnnnnnnnnnnnnnnnnnnnnnnnnnnnnnnnnnnnnnnnnnnnnnnnnnnnnnnnnnnnnnnnnnnnnnnnnnnnnnnnnnnnnnnnnnnnnnnnnnnnnnnnnnnnnnnnnnnnnnnnnnnnnnnnnnnnnnnnnnnnnnnnnnnnnnnnnnnnnnnnnnnnnnnnnnnnnnnnnnnnnnnnnnnnnnnnnnnnnnnnnnnnnnnnnnnnnnnnnnnnnnnnnnnnnnnnnnnnnnnnnnnnnnnnnnnnnnnnnnnnnnnnnnnnnnnnnnnnnnnnnnnnnnnnnnnnnnnnnnnnnnnnnnnnnnnnnnnnnnnnnnnnnnnnnnnnnnnnnnnnnnnnnnnnnnnnnnnnnnnnnnnnnnnnnnnnnnnnnnnnnnnnnnnnnnnnnnnnnnnnnnnnnnnnnnnnnnnnnnnnnnnnnnnnnnnnnnnnnnnnnnnnnnnnnnnnnnnnnnnnnnnnnnnnnnnnnnnnnnnnnnnnnnnnnnnnnnnnnnnnnnnnnnnnnnnnnnnnnnnnnnnnnnnnnnnnnnnnnnnnnnnnnnnnnnnnnnnnnnnnnnnnnnnnnnnnnnnnnnnnnnnnnnnnnnnnnnnnnnnnnnnnnnnnnnnnnnnnnnnnnnnnnnnnnnnnnnnnnnnnnnnnnnnnnnnnnnnnnnnnnnnnnnnnnnnnnnnnnnnnnnnnnnnnnnnnnnnnnnnnnnnnnnnnnnnnnnnnnnnnnnnnnnnnnnnnnnnnnnnnnnnnnnnnnnnnnnnnnnnnnnnnnnnnnnnnnnnnnnnnnnnnnnnnnnnnnnnnnnnnnnnnnnnnnnnnnnnnnnnnnnnnnnnnnnnnnnnnnnnnnnnnnnnnnnnnnnnnnnnnnnnnnnnnnnnnnnnnnnnnnnnnnnnnnnnnnnnnnnnnnnnnnnnnnnnnnnnnnnnnnnnnnnnnnnnnnnnnnnnnnnnnnnnnnnnnnnnnnnnnnnnnnnnnnnnnnnnnnnnnnnnnnnnnnnnnnnnnnnnnnnnnnnnnnnnnnnnnnnnnnnnnnnnnnnnnnnnnnnnnnnnnnnnnnnnnnnnnnnnnnnnnnnnnnnnnnnnnnnnnnnnnnnnnnnnnnnnnnnnnnnnnnnnnnnnnnnnnnnnnnnnnnnnnnnnnnnnnnnnnnnnnnnnnnnnnnnnnnnnnnnnnnnnnnnnnnnnnnnnnnnnnnnnnnnnnnnnnnnnnnnnnnnnnnnnnnnnnnnnnnnnnnnnnnnnnnnnnnnnnnnnnnnnnnnnnnnnnnnnnnnnnnnnnnnnnnnnnnnnnnnnnnnnnnnnnnnnnnnnnnnnnnnnnnnnnnnnnnnnnnnnnnnnnnnnnnnnnnnnnnnnnnnnnnnnnnnnnnnnnnnnnnnnnnnnnnnnnnnnnnnnnnnnnnnnnnnnnnnnnnnnnnnnnnnnnnnnnnnnnnnnnnnnnnnnnnnnnnnnnnnnnnnnnnnnnnnnnnnnnnnnnnnnnnnnnnnnnnnnnnnnnnnnnnnnnnnnnnnnnnnnnnnnnnnnnnnnnnnnnnnnnnnnnnnnnnnnnnnnnnnnnnnnnnnnnnnnnnnnnnnnnnnnnnnnnnnnnnnnnnnnnnnnnnnnnnnnnnnnnnnnnnnnnnnnnnnnnnnnnnnnnnnnnnnnnnnnnnnnnnnnnnnnnnnnnnnnnnnnnnnnnnnnnnnnnnnnnnnnnnnnnnnnnnnnnnnnnnnnnnnnnnnnnnnnnnnnnnnnnnnnnnnnnnnnnnnnnnnnnnnnnnnnnnnnnnnnnnnnnnnnnnnnnnnnnnnnnnnnnnnnnnnnnnnnnnnnnnnnnnnnnnnnnnnnnnnnnnnnnnnnnnnnnnnnnnnnnnnnnnnnnnnnnnnnnnnnnnnnnnnnnnnnnnnnnnnnnnnnnnnnnnnnnnnnnnnnnnnnnnnnnnnnnnnnnnnnnnnnnnnnnnnnnnnnnnnnnnnnnnnnnnnnnnnnnnnnnnnnnnnnnnnnnnnnnnnnnnnnnnnnnnnnnnnnnnnnnnnnnnnnnnnnnnnnnnnnnnnnnnnnnnnnnnnnnnnnnnnnnnnnnnnnnnnnnnnnnnnnnnnnnnnnnnnnnnnnnnnnnnnnnnnnnnnnnnnnnnnnnnnnnnnnnnnnnnnnnnnnnnnnnnnnnnnnnnnnnnnnnnnnnnnnnnnnnnnnnnnnnnnnnnnnnnnnnnnnnnnnnnnnnnnnnnnnnnnnnnnnnnnnnnnnnnnnnnnnnnnnnnnnnnnnnnnnnnnnnnnnnnnnnnnnnnnnnnnnnnnnnnnnnnnnnnnnnnnnnnnnnnnnnnnnnnnnnnnnnnnnnnnnnnnnnnnnnnnnnnnnnnnnnnnnnnnnnnnnnnnnnnnnnnnnnnnnnnnnnnnnnnnnnnnnnnnnnnnnnnnnnnnnnnnnnnnnnnnnnnnnnnnnnnnnnnnnnnnnnnnnnnnnnnnnnnnnnnnnnnnnnnnnnnnnnnnnnnnnnnnnnnnnnnnnnnnnnnnnnnnnnnnnnnnnnnnnnnnnnnnnnnnnnnnnnnnnnnnnnnnnnnnnnnnnnnnnnnnnnnnnnnnnnnnnnnnnnnnnnnnnnnnnnnnnnnnnnnnnnnnnnnnnnnnnnnnnnnnnnnnnnnnnnnnnnnnnnnnnnnnnnnnnnnnnnnnnnnnnnnnnnnnnnnnnnnnnnnnnnnnnnnnnnnnnnnnnnnnnnnnnnnnnnnnnnnnnnnnnnnnnnnnnnnnnnnnnnnnnnnnnnnnnnnnnnnnnnnnnnnnnnnnnnnnnnnnnnnnnnnnnnnnnnnnnnnnnnnnnnnnnnnnnnnnnnnnnnnnnnnnnnnnnnnnnnnnnnnnnnnnnnnnnnnnnnnnnnnnnnnnnnnnnnnnnnnnnnnnnnnnnnnnnnnnnnnnnnnnnnnnnnnnnnnnnnnnnnnnnnnnnnnnnnnnnnnnnnnnnnnnnnnnnnnnnnnnnnnnnnnnnnnnnnnnnnnnnnnnnnnnnnnnnnnnnnnnnnnnnnnnnnnnnnnnnnnnnnnnnnnnnnnnnnnnnnnnnnnnnnnnnnnnnnnnnnnnnnnnnnnnnnnnnnnnnnnnnnnnnnnnnnnnnnnnnnnnnnnnnnnnnnnnnnnnnnnnnnnnnnnnnnnnnnnnnnnnnnnnnnnnnnnnnnnnnnnnnnnnnnnnnnnnnnnnnnnnnnnnnnnnnnnnnnnnnnnnnnnnnnnnnnnnnnnnnnnnnnnnnnnnnnnnnnnnnnnnnnnnnnnnnnnnnnnnnnnnnnnnnnnnnnnnnnnnnnnnnnnnnnnnnnnnnnnnnnnnnnnnnnnnnnnnnnnnnnnnnnnnnnnnnnnnnnnnnnnnnnnnnnnnnnnnnnnnnnnnnnnnnnnnnnnnnnnnnnnnnnnnnnnnnnnnnnnnnnnnnnnnnnnnnnnnnnnnnnnnnnnnnnnnnnnnnnnnnnnnnnnnnnnnnnnnnnnnnnnnnnnnnnnnnnnnnnnnnnnnnnnnnnnnnnnnnnnnnnnnnnnnnnnnnnnnnnnnnnnnnnnnnnnnnnnnnnnnnnnnnnnnnnnnnnnnnnnnnnnnnnnnnnnnnnnnnnnnnnnnnnnnnnnnnnnnnnnnnnnnnnnnnnnnnnnnnnnnnnnnnnnnnnnnnnnnnnnnnnnnnnnnnnnnnnnnnnnnnnnnnnnnnnnnnnnnnnnnnnnnnnnnnnnnnnnnnnnnnnnnnnnnnnnnnnnnnnnnnnnnnnnnnnnnnnnnnnnnnnnnnnnnnnnnnnnnnnnnnnnnnnnnnnnnnnnnnnnnnnnnnnnnnnnnnnnnnnnnnnnnnnnnnnnnnnnnnnnnnnnnnnnnnnnnnnnnnnnnnnnnnnnnnnnnnnnnnnnnnnnnnnnnnnnnnnnnnnnnnnnnnnnnnnnnnnnnnnnnnnnnnnnnnnnnnnnnnnnnnnnnnnnnnnnnnnnnnnnnnnnnnnnnnnnnnnnnnnnnnnnnnnnnnnnnnnnnnnnnnnnnnnnnnnnnnnnnnnnnnnnnnnnnnnnnnnnnnnnnnnnnnnnnnnnnnnnnnnnnnnnnnnnnnnnnnnnnnnnnnnnnnnnnnnnnnnnnnnnnnnnnnnnnnnnnnnnnnnnnnnnnnnnnnnnnnnnnnnnnnnnnnnnnnnnnnnnnnnnnnnnnnnnnnnnnnnnnnnnnnnnnnnnnnnnnnnnnnnnnnnnnnnnnnnnnnnnnnnnnnnnnnnnnnnnnnnnnnnnnnnnnnnnnnnnnnnnnnnnnnnnnnnnnnnnnnnnnnnnnnnnnnnnnnnnnnnnnnnnnnnnnnnnnnnnnnnnnnnnnnnnnnnnnnnnnnnnnnnnnnnnnnnnnnnnnnnnnnnnnnnnnnnnnnnnnnnnnnnnnnnnnnnnnnnnnnnnnnnnnnnnnnnnnnnnnnnnnnnnnnnnnnnnnnnnnnnnnnnnnnnnnnnnnnnnnnnnnnnnnnnnnnnnnnnnnnnnnnnnnnnnnnnnnnnnnnnnnnnnnnnnnnnnnnnnnnnnnnnnnnnnnnnnnnnnnnnnnnnnnnnnnnnnnnnnnnnnnnnnnnnnnnnnnnnnnnnnnnnnnnnnnnnnnnnnnnnnnnnnnnnnnnnnnnnnnnnnnnnnnnnnnnnnnnnnnnnnnnnnnnnnnnnnnnnnnnnnnnnnnnnnnnnnnnnnnnnnnnnnnnnnnnnnnnnnnnnnnnnnnnnnnnnnnnnnnnnnnnnnnnnnnnnnnnnnnnnnnnnnnnnnnnnnnnnnnnnnnnnnnnnnnnnnnnnnnnnnnnnnnnnnnnnnnnnnnnnnnnnnnnnnnnnnnnnnnnnnnnnnnnnnnnnnnnnnnnnnnnnnnnnnnnnnnnnnnnnnnnnnnnnnnnnnnnnnnnnnnnnnnnnnnnnnnnnnnnnnnnnnnnnnnnnnnnnnnnnnnnnnnnnnnnnnnnnnnnnnnnnnnnnnnnnnnnnnnnnnnnnnnnnnnnnnnnnnnnnnnnnnnnnnnnnnnnnnnnnnnnnnnnnnnnnnnnnnnnnnnnnnnnnnnnnnnnnnnnnnnnnnnnnnnnnnnnnnnnnnnnnnnnnnnnnnnnnnnnnnnnnnnnnnnnnnnnnnnnnnnnnnnnnnnnnnnnnnnnnnnnnnnnnnnnnnnnnnnnnnnnnnnnnnnnnnnnnnnnnnnnnnnnnnnnnnnnnnnnnnnnnnnnnnnnnnnnnnnnnnnnnnnnnnnnnnnnnnnnnnnnnnnnnnnnnnnnnnnnnnnnnnnnnnnnnnnnnnnnnnnnnnnnnnnnnnnnnnnnnnnnnnnnnnnnnnnnnnnnnnnnnnnnnnnnnnnnnnnnnnnnnnnnnnnnnnnnnnnnnnnnnnnnnnnnnnnnnnnnnnnnnnnnnnnnnnnnnnnnnnnnnnnnnnnnnnnnnnnnnnnnnnnnnnnnnnnnnnnnnnnnnnnnnnnnnnnnnnnnnnnnnnnnnnnnnnnnnnnnnnnnnnnnnnnnnnnnnnnnnnnnnnnnnnnnnnnnnnnnnnnnnnnnnnnnnnnnnnnnnnnnnnnnnnnnnnnnnnnnnnnnnnnnnnnnnnnnnnnnnnnnnnnnnnnnnnnnnnnnnnnnnnnnnnnnnnnnnnnnnnnnnnnnnnnnnnnnnnnnnnnnnnnnnnnnnnnnnnnnnnnnnnnnnnnnnnnnnnnnnnnnnnnnnnnnnnnnnnnnnnnnnnnnnnnnnnnnnnnnnnnnnnnnnnnnnnnnnnnnnnnnnnnnnnnnnnnnnnnnnnnnnnnnnnnnnnnnnnnnnnnnnnnnnnnnnnnnnnnnnnnnnnnnnnnnnnnnnnnnnnnnnnnnnnnnnnnnnnnnnnnnnnnnnnnnnnnnnnnnnnnnnnnnnnnnnnnnnnnnnnnnnnnnnnnnnnnnnnnnnnnnnnnnnnnnnnnnnnnnnnnnnnnnnnnnnnnnnnnnnnnnnnnnnnnnnnnnnnnnnnnnnnnnnnnnnnnnnnnnnnnnnnnnnnnnnnnnnnnnnnnnnnnnnnnnnnnnnnnnnnnnnnnnnnnnnnnnnnnnnnnnnnnnnnnnnnnnnnnnnnnnnnnnnnnnnnnnnnnnnnnnnnnnnnnnnnnnnnnnnnnnnnnnnnnnnnnnnnnnnnnnnnnnnnnnnnnnnnnnnnnnnnnnnnnnnnnnnnnnnnnnnnnnnnnnnnnnnnnnnnnnnnnnnnnnnnnnnnnnnnnnnnnnnnnnnnnnnnnnnnnnnnnnnnnnnnnnnnnnnnnnnnnnnnnnnnnnnnnnnnnnnnnnnnnnnnnnnnnnnnnnnnnnnnnnnnnnnnnnnnnnnnnnnnnnnnnnnnnnnnnnnnnnnnnnnnnnnnnnnnnnnnnnnnnnnnnnnnnnnnnnnnnnnnnnnnnnnnnnnnnnnnnnnnnnnnnnnnnnnnnnnnnnnnnnnnnnnnnnnnnnnnnnnnnnnnnnnnnnnnnnnnnnnnnnnnnnnnnnnnnnnnnnnnnnnnnnnnnnnnnnnnnnnnnnnnnnnnnnnnnnnnnnnnnnnnnnnnnnnnnnnnnnnnnnnnnnnnnnnnnnnnnnnnnnnnnnnnnnnnnnnnnnnnnnnnnnnnnnnnnnnnnnnnnnnnnnnnnnnnnnnnnnnnnnnnnnnnnnnnnnnnnnnnnnnnnnnnnnnnnnnnnnnnnnnnnnnnnnnnnnnnnnnnnnnnnnnnnnnnnnnnnnnnnnnnnnnnnnnnnnnnnnnnnnnnnnnnnnnnnnnnnnnnnnnnnnnnnnnnnnnnnnnnnnnnnnnnnnnnnnnnnnnnnnnnnnnnnnnnnnnnnnnnnnnnnnnnnnnnnnnnnnnnnnnnnnnnnnnnnnnnnnnnnnnnnnnnnnnnnnnnnnnnnnnnnnnnnnnnnnnnnnnnnnnnnnnnnnnnnnnnnnnnnnnnnnnnnnnnnnnnnnnnnnnnnnnnnnnnnnnnnnnnnnnnnnnnnnnnnnnnnnnnnnnnnnnnnnnnnnnnnnnnnnnnnnnnnnnnnnnnnnnnnnnnnnnnnnnnnnnnnnnnnnnnnnnnnnnnnnnnnnnnnnnnnnnnnnnnnnnnnnnnnnnnnnnnnnnnnnnnnnnnnnnnnnnnnnnnnnnnnnnnnnnnnnnnnnnnnnnnnnnnnnnnnnnnnnnnnnnnnnnnnnnnnnnnnnnnnnnnnnnnnnnnnnnnnnnnnnnnnnnnnnnnnnnnnnnnnnnnnnnnnnnnnnnnnnnnnnnnnnnnnnnnnnnnnnnnnnnnnnnnnnnnnnnnnnnnnnnnnnnnnnnnnnnnnnnnnnnnnnnnnnnnnnnnnnnnnnnnnnnnnnnnnnnnnnnnnnnnnnnnnnnnnnnnnnnnnnnnnnnnnnnnnnnnnnnnnnnnnnnnnnnnnnnnnnnnnnnnnnnnnnnnnnnnnnnnnnnnnnnnnnnnnnnnnnnnnnnnnnnnnnnnnnnnnnnnnnnnnnnnnnnnnnnnnnnnnnnnnnnnnnnnnnnnnnnnnnnnnnnnnnnnnnnnnnnnnnnnnnnnnnnnnnnnnnnnnnnnnnnnnnnnnnnnnnnnnnnnnnnnnnnnnnnnnnnnnnnnnnnnnnnnnnnnnnnnnnnnnnnnnnnnnnnnnnnnnnnnnnnnnnnnnnnnnnnnnnnnnnnnnnnnnnnnnnnnnnnnnnnnnnnnnnnnnnnnnnnnnnnnnnnnnnnnnnnnnnnnnnnnnnnnnnnnnnnnnnnnnnnnnnnnnnnnnnnnnnnnnnnnnnnnnnnnnnnnnnnnnnnnnnnnnnnnnnnnnnnnnnnnnnnnnnnnnnnnnnnnnnnnnnnnnnnnnnnnnnnnnnnnnnnnnnnnnnnnnnnnnnnnnnnnnnnnnnnnnnnnnnnnnnnnnnnnnnnnnnnnnnnnnnnnnnnnnnnnnnnnnnnnnnnnnnnnnnnnnnnnnnnnnnnnnnnnnnnnnnnnnnnnnnnnnnnnnnnnnnnnnnnnnnnnnnnnnnnnnnnnnnnnnnnnnnnnnnnnnnnnnnnnnnnnnnnnnnnnnnnnnnnnnnnnnnnnnnnnnnnnnnnnnnnnnnnnnnnnnnnnnnnnnnnnnnnnnnnnnnnnnnnnnnnnnnnnnnnnnnnnnnnnnnnnnnnnnnnnnnnnnnnnnnnnnnnnnnnnnnnnnnnnnnnnnnnnnnnnnnnnnnnnnnnnnnnnnnnnnnnnnnnnnnnnnnnnnnnnnnnnnnnnnnnnnnnnnnnnnnnnnnnnnnnnnnnnnnnnnnnnnnnnnnnnnnnnnnnnnnnnnnnnnnnnnnnnnnnnnnnnnnnnnnnnnnnnnnnnnnnnnnnnnnnnnnnnnnnnnnnnnnnnnnnnnnnnnnnnnnnnnnnnnnnnnnnnnnnnnnnnnnnnnnnnnnnnnnnnnnnnnnnnnnnnnnnnnnnnnnnnnnnnnnnnnnnnnnnnnnnnnnnnnnnnnnnnnnnnnnnnnnnnnnnnnnnnnnnnnnnnnnnnnnnnnnnnnnnnnnnnnnnnnnnnnnnnnnnnnnnnnnnnnnnnnnnnnnnnnnnnnnnnnnnnnnnnnnnnnnnnnnnnnnnnnnnnnnnnnnnnnnnnnnnnnnnnnnnnnnnnnnnnnnnnnnnnnnnnnnnnnnnnnnnnnnnnnnnnnnnnnnnnnnnnnnnnnnnnnnnnnnnnnnnnnnnnnnnnnnnnnnnnnnnnnnnnnnnnnnnnnnnnnnnnnnnnnnnnnnnnnnnnnnnnnnnnnnnnnnnnnnnnnnnnnnnnnnnnnnnnnnnnnnnnnnnnnnnnnnnnnnnnnnnnnnnnnnnnnnnnnnnnnnnnnnnnnnnnnnnnnnnnnnnnnnnnnnnnnnnnnnnnnnnnnnnnnnnnnnnnnnnnnnnnnnnnnnnnnnnnnnnnnnnnnnnnnnnnnnnnnnnnnnnnnnnnnnnnnnnnnnnnnnnnnnnnnnnnnnnnnnnnnnnnnnnnnnnnnnnnnnnnnnnnnnnnnnnnnnnnnnnnnnnnnnnnnnnnnnnnnnnnnnnnnnnnnnnnnnnnnnnnnnnnnnnnnnnnnnnnnnnnnnnnnnnnnnnnnnnnnnnnnnnnnnnnnnnnnnnnnnnnnnnnnnnnnnnnnnnnnnnnnnnnnnnnnnnnnnnnnnnnnnnnnnnnnnnnnnnnnnnnnnnnnnnnnnnnnnnnnnnnnnnnnnnnnnnnnnnnnnnnnnnnnnnnnnnnnnnnnnnnnnnnnnnnnnnnnnnnnnnnnnnnnnnnnnnnnnnnnnnnnnnnnnnnnnnnnnnnnnnnnnnnnnnnnnnnnnnnnnnnnnnnnnnnnnnnnnnnnnnnnnnnnnnnnnnnnnnnnnnnnnnnnnnnnnnnnnnnnnnnnnnnnnnnnnnnnnnnnnnnnnnnnnnnnnnnnnnnnnnnnnnnnnnnnnnnnnnnnnnnnnnnnnnnnnnnnnnnnnnnnnnnnnnnnnnnnnnnnnnnnnnnnnnnnnnnnnnnnnnnnnnnnnnnnnnnnnnnnnnnnnnnnnnnnnnnnnnnnnnnnnnnnnnnnnnnnnnnnnnnnnnnnnnnnnnnnnnnnnnnnnnnnnnnnnnnnnnnnnnnnnnnnnnnnnnnnnnnnnnnnnnnnnnnnnnnnnnnnnnnnnnnnnnnnnnnnnnnnnnnnnnnnnnnnnnnnnnnnnnnnnnnnnnnnnnnnnnnnnnnnnnnnnnnnnnnnnnnnnnnnnnnnnnnnnnnnnnnnnnnnnnnnnnnnnnnnnnnnnnnnnnnnnnnnnnnnnnnnnnnnnnnnnnnnnnnnnnnnnnnnnnnnnnnnnnnnnnnnnnnnnnnnnnnnnnnnnnnnnnnnnnnnnnnnnnnnnnnnnnnnnnnnnnnnnnnnnnnnnnnnnnnnnnnnnnnnnnnnnnnnnnnnnnnnnnnnnnnnnnnnnnnnnnnnnnnnnnnnnnnnnnnnnnnnnnnnnnnnnnnnnnnnnnnnnnnnnnnnnnnnnnnnnnnnnnnnnnnnnnnnnnnnnnnnnnnnnnnnnnnnnnnnnnnnnnnnnnnnnnnnnnnnnnnnnnnnnnnnnnnnnnnnnnnnnnnnnnnnnnnnnnnnnnnnnnnnnnnnnnnnnnnnnnnnnnnnnnnnnnnnnnnnnnnnnnnnnnnnnnnnnnnnnnnnnncagaataacacacgtcttttcagcgatgccagcttttcgatcacgcttgaaaatatcattcctctcctgtacactcacagcatcagtcatttcaaaaatcatcaactttgacaaattcagaccgccttgggacctagaggaaagggtagggtcgctatggccagtggaaaaatttttattaattatcgccgggatgacagccgggcagattcaggccgattgtatgatcgcctcaaggctcgttatccgaatcatgtctttcgcgatattgggtcccttgaaccgggtgtcgagtggcaggaagctatcgagaaggtgttgggttcaagcgatgcagtcgtggtggtgatcggcaaaagctggctgacggtgacgaattcggcgggcacccgacgacttgacgacccgaaggatacggttcgtcaggagatcttgactgctctccggcgaggcgtgcgggtgtttccagtgctggtgggtggagcccgcatgccgtcggaagaagagcttccagcagaccttcaatcgcttgcgcggcgcaacgctctcgaaattaccgagcaagactgggatgaaggcttcgagaaactcgcagaggcgcttgaccacgccttgggcgtacggggaaggacgccgaaacagcggcgccgcttcaggccgggtgtggctgccgttgcgcttcttggcgcgacaatcattgcagccgtcgtggtcacgatttatcactcagcgcagaactcgcccgtgtccgtcgtgcgcgaagacgccggccctcagaaagacgccatgcctaatgctgctgacagggcgccaacaaacggagcgggagcggagtcgaatgctggcatacgctcattgaaaacctctgtcgctccgccgcgagaacaggctagccgcacatcgtcagggccaaccaaggcttccgcaccagcgcgaataacctctgctccggtatctcccccgccggctgaaatcagctctgctcattttgttggcaactggcgggcaatagtgacaggttccggtcagcaactcatcgagagcgttgatctctacccggatttcagctttggtgtcacactgaaccgttcgtctgccgccgttggaggatggcaatacaacgccgcagatgacgttctgaatttttcaaatggcacaaattttctcaacaacggagttaagtttgcctgcaaattgaaaggcactgacggaacacacgccaactttggcgggccttgccttgacctgatgcagatgagctggaatgtggcgctgactcgtgagggaaatctttccgaggtggtttacaacgtgccgaaggttgacctttcggccctgacgatggctgaaaaagccgcctttaccgaagcgttatcgcaaggcttctgcacttgcggttgcgggatgacgatccttaattgtctgcgcaatgaccgcacctgcctggtaagccccaacctggcgcgcgcggaactggtggtgttgatgcaatacaggcgccgatgagggggtagccttgagcctgaactatcagcaagactcccttttacgacggatcaggcatcctttgtctttgtggcctgctcctgccccgccgcccacttggcgtgctcctgcgaaaccaacgactcaattctttccgccaagagtgtatggggattgatggcagcagcgtaaggaccagccccggctaaatagagatatttttcgtgcttcagggattcgcaagtggaacggtaagtgatccagttgtaatgatattgattgagttggagcacgccttccaaaattgcgatcagcgccccaaggcttcccgccacccacggcaatttgaaaccagaaaataacggaaccaggcccgccgcaccaatctcaatcaccttcatccacttgaaagtgcgctggttgaaattactcttgtgatcgtaccaaccaatttgatcttcgaggcgttcaagcgtcgggtcagcatcaggcatgtctcacctcgtctatcggagtgcctaagattctagcctaatctgcgtcaaggtctacactcagaatattcttgctggccgcataaggcattggaacaggcttgattggaacccgaaaataggttggcggagggagagggattcgaacccccgagcccctttcggggctaacggttttcaagaccgccggtttcaaccactcacccatccctccgggaagtccacttcaacggtatgaagcaatcggctttattttagcagaacaagcgccggctgaagaaccggttgcggagccttttgccccggggtcgaacttgggggagcgtgctcgcatgaaattcaccaaacatcagtattctcggccgaaggatggcttgttcgttaaagccttccacaaaaaaccccctgcatttctcgaaaaattttcgtaaaatgtgaagccttccggtgaacctccggcaaagaggaggggggcatgagctacaacctacttgaggaagattggattccagttctatggaagactggaaagctcactcgcgtcaacctcattcaggtgctcactgaagcacactgcatccgccagattgccgccaccaatcccatggaccgcgtggccaccctgcgttttctgctcgcactgctttattggtgcgtaggggatccaccgcgcgatccaacctcgggtggcaccttttccgaagcatggtttaccaaactctatgaaaacaaggaatgcttcaatttgctgggagacggaatccggttctatcagtaccgtccaggctcgggaaaagacaaaaagctttccgtcaactatctcattcatgaagtgccgacggggtccaatgtacggcatttccggcattccgcggacggagttaacggcctttgtcgggcgtgttgtgccacagggttgttgcggctacctgtattcaccacccaaggggggaaaggaaaatcaccaggcatcaatggcaaaccccccgtctacgtcatacctctcggacgatccctgtgtgagaccttgtggctctcttggcgaccacagtcgaatttgggtacgcctgcatgggagaagcctgacatggcactgcccaagactggcgaagtccccctcctgaccgggctcacatggctgccgcgacgcgtttggctggacgaccccatggaacccgaagtcccttgtatttgttgcgggcgaaaagagcttctgattcggcagtgcatatttgccggcatcggtagcggcaaggcggatggccgagtttggaacgacccgcacgtcgttcgtgacaaaaatgtggtgatgacaccaagtaatgcccttgccgattccgataaagcggctgacgattgggcaaagataactgcggcgatcctcatcgataccaagcacacttccagacgccgattctgggttgttggtttcgcaagtaaacaggacaagtacctggaagcgaaggaatttgagattttccttcaacctaccacggaaagtgctcagattcaagatgccatcaaggagatcgagagatggcaaagagaagcagcggggctggcaaaaagagttgtcagagtggtgaagaacaagaaatcctcgcgaaaacatgttgagatcgacgccctggtaaaagccattcggcctcatatcgaagccagtgcctctgtgaaattgaaccgcctcatttccgacggccacccggcatgggagggggcggccaactactatgaagggatgatggttgccatctctagatcaatttctccggattttacggccacagcgctacgacagcggcaggaaattgcgcgcgttaaaccagacatgcggttaaaaacagagaaggcagggaatctgaccgcaagagaggcgataagtgactccaacagaacagtacatcaaacgcctgacacacctgaagaccggtgacctcggattgctgcgcacccacgcggggcaggagctcgatgagaaggtagagggcttcgacctgtttacgggcctatggtggccgctgcgtcaaaggaactcgcgggcaccccgccgtgacgtggcatggctcgtcgccaagctctatgccttccggccactcgagtattcggcggaagagacgctagctttccttcttgggcaatgccaaccagaagttggcaagcgggagaagttcatccagcggtttgataggatgctgactctgcccatccgcaaaatcgaacctgcgttgcaatgggcgcttgacgtgctcaattcaaagggcatgggactcgactggataaaactcacggatgatctttcggtttgggaacgagaatccacccgtctcgaatgggcaaaggaatttttgaagtctctaggaggaggataaatgctgatccagattcacgctattcaaaatcacgctccggccaatttgaaccgagatgacttgggcgcgcccaaagcctgctatttcggcggtgtgctgcgctcgcgcatctccagccaatgcctcaagcgcagcatccgtagaagcgacgagttcaggcagttgctaggcggtgttcgtacgcggcaattagcgaaattgatagctgacaagattcccgagaaagatgtgaggaagcgtgcggagaagattcttgaaatatgcggattcaagccctggagatcggaaggcgagtccgaaaattctgagaagagcaaaatgcttgtctatactaccaaacaggctgttgaagagatggcgaacctcctccgaaacagcgatggaaaggctgagagtgaactggcggaggggttcgccggacttattgcggagcgcacggcagttccggacatggccttgtcgggccgcatgctggagccggacaaatcttctacggtttgggagaagcgtgatactaaggtggaagcagcacttcaagtggcccatgcaatctccacccatgaggcccgccccgaggtggattactacgtcgctgccgatgacatccccggcgaggacgcgggtgccggctttgtggacgaggctatgtttgcctcggcctgtttttacaaatatttctcaatccactgggagcaattggtgaaaaacctcatggggtttggggaagaacatgaaaagctggccgcacatacggtgggcgcattcattcggggggctgcgatggtgaaccccactggaaaacagaacagtttcgccgcgcataatcctcccgatggcatgctggttgagatcagggacacccctctcagctacgccaacgcttttgcgaaacccgcggttgctcagggtgaacgtgacctcatcgcccagagcatcgcgcagcttggccaatacatccacgacatggacaccgggtacggtaagccaacggagcgattctggttctcgcctaattcccgccatcctctgctggcttacatcgaggaagaacaagatggaaaaaagaaacgacgtgagattgcgcttaccgacaataatctcagttcgctcgatatcttaattcaaaaggtcatcgagaaaatcggccacaattggcatgaggttcagaaaattactgtgaacgcagaggtggtttgatgagggccaacaccttatttcttcgcttggagggtcttcttcaagcctggggagaccaccagtcaaagtttgtcatccgacggacggcggaagctccgaccaagtctggcgttgtcgggatgctgtgcgccgccctgggggttagcagatgtaaagcctctaatgaatggcttcgaaagctgggctcgctttgtatgggggcgcgcattgatgcgccgggtgtccgctggtgggactatcagacggtcggagccaaggtcggaatacccagggcagatggtgctggcgctaagagaacggccgcgacgggggaaattgaaactctcatcacgcgtcgcgaatatctctgcgacgcatccttcctgatcgctttgcagggtgaggccgacctgatagcgcagttggagaccgcagtaggagcgcccaagtggacgctctatcttggtagaaaatgctgccctccgtcacgccctttgctggaaaaacccgcaagcggtgagtttcccgatttactctcagcccttaagtcgattccttggcgcaaacggatgaaggaggatcaaccgcccaaaacggttgactgcctgctcgattggcagcccacggcagatcagcctgaagcgcctgatgatgccttcgtctggtatgatgtgccccgcacctttgaaccaccctcgcacgaaccccgattcgtgctccggcgtcaattgccagtggccatcgagggcggcgtgggcgtcgcaggccagccggcgcagaccgaaactccgccgccgccccgcccgcgggccgattacaccaactccgcctacaggaacaagcgcctggagcggcttgcccgcgaccagcagctttgcgttttttgcaaggcgccagccacaacggtacaacacatcacctatcggcgcgccggaggcaatgaaagcttggaagatctgcgttcgctctgccgtttgtgtcatgacgccgtgaccatgatcgagtatggtttaaacatgggtctggatcggatcaatcccgaagagccacgttggcgcgaccagattattgccaagcggaacgagatcatcgccttccgctcgctcgaaacgcgtcggcgacgcctcgctccagaggaggtggaatagccatgtggatttcgtgtctcctgatcgacgtcggtgacaatcccgaccgcccccgccccgggcgccaatggctgcgaaacctctatcgcgttcaccagcgcctttgcatggcgtttccctccgaccgcagaaagcagtacgacccagagtttttaaagccctaccagccagaggattttgggaacggccatgttcatgttgagcgcgggccgaccgctggctttctcttccgccttgatcccgaggaacgatgttgccgcgaagcatcacaggctcggcattccggcagtcgggtggtaattctggtacagtctgcaccaaaacctgactgggaatacgcctttcacaacgcctgttatctgctggccgccccgccggaagtaaagccattcaacccgtgctacacaacgggtcagcggcttcgattccgcctccttgcgaatcctacccgccgcctcacggaacactcgcttggagccgacggacagctcgtcaagaaatgggcgaatacggataagaaagggatgcgcgtgcctgtgccgacggatcaactcctcgattggatcaatcggcgagctgaaaaggcggggttttctatcgagaaggattccatcaatgttttgccgggttatgtgttcgccaacaaaagaggggacaggcatggaattcgcctgcgctctgtccgttatgacgggcttctcagcgttaccgagcccgcactgtttcggcaagcgattatacaaggcatcgggccaggcaaagctttcggcttcgggctgctttcggtagcgccgtgttgtaccggaggtctatgaccgccatttttgacctcctgccccgtttgattctttacagtggagaccacaccatcgccacacttaccactaccgggcccttcctcagcgaagagggtaattccccgccttggttaaggaggggataaggggtggttggtgtaaagaacgggctgagagaggacgccagccgcctcgatcatcgatggggcgcagctacaaaaacatgaaagacctccatctgttgcccaaagtccgcgatagttccagtttcctttacgtcgagcattgcaagatcgaccaggagggcaaagcgatcgccattcacgacgcgaagggccgagtgccagtaccctgcgcgtcattgctggtgctgatgctcggtcccggcaccagcatcacgcacgcggctgtgcgatctcttgctgacaatggctgcaccatcctctggacgggcgaagagggcgtccgaacctacgctcagggcatgggagaaacgcgctcttccgaacgcctgctgcatcagtcacgcctctgctctgcgcccgaattgcgcttcatagtggttaaaaggctttacaagatgcgtttcccggagaagctggacccctccctgaccatccagcaattgcgcggcatggagggtgtccgggtgcgcgacgcatacttccgcgccagccgcgaggcgggcattccgtggtccggccgatcctacaaaaccgataactggcaggccgccgatgccgtcaatcgcgccctttcggtggccaacagttgcctctacggcgtctgccacgccgccattgtttccgtcggttattcaccggccttgggatttattcacaccggaaagatgctctcctttgtctacgatgttgccgacctgtataaaaccgaagtcaccattcccctcgcctttcgggccgcagccgaaggaatgggctttcaggaaagccacgtaagaaggaaatgtcgcgacgcgtttgtggaaagccgcttattacagagaattatccccgatatcgaccgcgctctcgattggggttcttcggaaggtgggcagggggatgccagactggatgcccaaccagcggctccagggtggctctgggatcccgaagtgggggcggtggagggaggcatcaaccgcggagatgatgctgaaggaggtgacaagccacggtcgtgatggtgctcgaaaatgcccctcccagcgtgcgcggggaactgacacgatggatgctggaattgcatgctggcgtttttgtgggaaacatttccgcgctggtgcgggaaaagctctggcaggaagtctgccgcaaattggcgggtggggctggaattctggtctacaatgctgccaacgagcaggggtttgatatccgcttttggggatcgccctctcggcgggtcgaaaacttcgagggacttcttctagttcgcgggccataagccctttaaatcgcagcgtcgtccccacgcgtgtgggggtgaaccgttcatcggcgcccggccaatcaagattacgcggtcgtccccacgcgtgtgggggtgaaccatgatctgaatcgcttccgtaatcggccttcttgtcgtccccacgcgtgtgggggtgaaccgccccgcggacggccaacgaagggcgtgagacagtcgtccccacgcgtgtgggggtgaaccgcttcgccgttccgcgagactgcaggcttggatgtcgtccccacgcgtgtgggggtgaaccgcttaaccctatcccctatcccaaacccttcccgtcgtccccacgcgtgtgggggtgaaccgacaactcgcgcgataacagccagttacggaccgtcgtccccacgcgtgtgggggtgaaccgtccccaacgacggg

SEQ ID NO: 1067 - DNA, 105569 bp, Artificial Sequence
  Synthetic Oligonucleotide
  misc_feature (1)..(96242): n is a, c, g, or t
nnnnnnnnnnnnnnnnnnnnnnnnnnnnnnnnnnnnnnnnnnnnnnnnnnnnnnnnnnnnnnnnnnnnnnnnnnnnnnnnnnnnnnnnnnnnnnnnnnnnnnnnnnnnnnnnnnnnnnnnnnnnnnnnnnnnnnnnnnnnnnnnnnnnnnnnnnnnnnnnnnnnnnnnnnnnnnnnnnnnnnnnnnnnnnnnnnnnnnnnnnnnnnnnnnnnnnnnnnnnnnnnnnnnnnnnnnnnnnnnnnnnnnnnnnnnnnnnnnnnnnnnnnnnnnnnnnnnnnnnnnnnnnnnnnnnnnnnnnnnnnnnnnnnnnnnnnnnnnnnnnnnnnnnnnnnnnnnnnnnnnnnnnnnnnnnnnnnnnnnnnnnnnnnnnnnnnnnnnnnnnnnnnnnnnnnnnnnnnnnnnnnnnnnnnnnnnnnnnnnnnnnnnnnnnnnnnnnnnnnnnnnnnnnnnnnnnnnnnnnnnnnnnnnnnnnnnnnnnnnnnnnnnnnnnnnnnnnnnnnnnnnnnnnnnnnnnnnnnnnnnnnnnnnnnnnnnnnnnnnnnnnnnnnnnnnnnnnnnnnnnnnnnnnnnnnnnnnnnnnnnnnnnnnnnnnnnnnnnnnnnnnnnnnnnnnnnnnnnnnnnnnnnnnnnnnnnnnnnnnnnnnnnnnnnnnnnnnnnnnnnnnnnnnnnnnnnnnnnnnnnnnnnnnnnnnnnnnnnnnnnnnnnnnnnnnnnnnnnnnnnnnnnnnnnnnnnnnnnnnnnnnnnnnnnnnnnnnnnnnnnnnnnnnnnnnnnnnnnnnnnnnnnnnnnnnnnnnnnnnnnnnnnnnnnnnnnnnnnnnnnnnnnnnnnnnnnnnnnnnnnnnnnnnnnnnnnnnnnnnnnnnnnnnnnnnnnnnnnnnnnnnnnnnnnnnnnnnnnnnnnnnnnnnnnnnnnnnnnnnnnnnnnnnnnnnnnnnnnnnnnnnnnnnnnnnnnnnnnnnnnnnnnnnnnnnnnnnnnnnnnnnnnnnnnnnnnnnnnnnnnnnnnnnnnnnnnnnnnnnnnnnnnnnnnnnnnnnnnnnnnnnnnnnnnnnnnnnnnnnnnnnnnnnnnnnnnnnnnnnnnnnnnnnnnnnnnnnnnnnnnnnnnnnnnnnnnnnnnnnnnnnnnnnnnnnnnnnnnnnnnnnnnnnnnnnnnnnnnnnnnnnnnnnnnnnnnnnnnnnnnnnnnnnnnnnnnnnnnnnnnnnnnnnnnnnnnnnnnnnnnnnnnnnnnnnnnnnnnnnnnnnnnnnnnnnnnnnnnnnnnnnnnnnnnnnnnnnnnnnnnnnnnnnnnnnnnnnnnnnnnnnnnnnnnnnnnnnnnnnnnnnnnnnnnnnnnnnnnnnnnnnnnnnnnnnnnnnnnnnnnnnnnnnnnnnnnnnnnnnnnnnnnnnnnnnnnnnnnnnnnnnnnnnnnnnnnnnnnnnnnnnnnnnnnnnnnnnnnnnnnnnnnnnnnnnnnnnnnnnnnnnnnnnnnnnnnnnnnnnnnnnnnnnnnnnnnnnnnnnnnnnnnnnnnnnnnnnnnnnnnnnnnnnnnnnnnnnnnnnnnnnnnnnnnnnnnnnnnnnnnnnnnnnnnnnnnnnnnnnnnnnnnnnnnnnnnnnnnnnnnnnnnnnnnnnnnnnnnnnnnnnnnnnnnnnnnnnnnnnnnnnnnnnnnnnnnnnnnnnnnnnnnnnnnnnnnnnnnnnnnnnnnnnnnnnnnnnnnnnnnnnnnnnnnnnnnnnnnnnnnnnnnnnnnnnnnnnnnnnnnnnnnnnnnnnnnnnnnnnnnnnnnnnnnnnnnnnnnnnnnnnnnnnnnnnnnnnnnnnnnnnnnnnnnnnnnnnnnnnnnnnnnnnnnnnnnnnnnnnnnnnnnnnnnnnnnnnnnnnnnnnnnnnnnnnnnnnnnnnnnnnnnnnnnnnnnnnnnnnnnnnnnnnnnnnnnnnnnnnnnnnnnnnnnnnnnnnnnnnnnnnnnnnnnnnnnnnnnnnnnnnnnnnnnnnnnnnnnnnnnnnnnnnnnnnnnnnnnnnnnnnnnnnnnnnnnnnnnnnnnnnnnnnnnnnnnnnnnnnnnnnnnnnnnnnnnnnnnnnnnnnnnnnnnnnnnnnnnnnnnnnnnnnnnnnnnnnnnnnnnnnnnnnnnnnnnnnnnnnnnnnnnnnnnnnnnnnnnnnnnnnnnnnnnnnnnnnnnnnnnnnnnnnnnnnnnnnnnnnnnnnnnnnnnnnnnnnnnnnnnnnnnnnnnnnnnnnnnnnnnnnnnnnnnnnnnnnnnnnnnnnnnnnnnnnnnnnnnnnnnnnnnnnnnnnnnnnnnnnnnnnnnnnnnnnnnnnnnnnnnnnnnnnnnnnnnnnnnnnnnnnnnnnnnnnnnnnnnnnnnnnnnnnnnnnnnnnnnnnnnnnnnnnnnnnnnnnnnnnnnnnnnnnnnnnnnnnnnnnnnnnnnnnnnnnnnnnnnnnnnnnnnnnnnnnnnnnnnnnnnnnnnnnnnnnnnnnnnnnnnnnnnnnnnnnnnnnnnnnnnnnnnnnnnnnnnnnnnnnnnnnnnnnnnnnnnnnnnnnnnnnnnnnnnnnnnnnnnnnnnnnnnnnnnnnnnnnnnnnnnnnnnnnnnnnnnnnnnnnnnnnnnnnnnnnnnnnnnnnnnnnnnnnnnnnnnnnnnnnnnnnnnnnnnnnnnnnnnnnnnnnnnnnnnnnnnnnnnnnnnnnnnnnnnnnnnnnnnnnnnnnnnnnnnnnnnnnnnnnnnnnnnnnnnnnnnnnnnnnnnnnnnnnnnnnnnnnnnnnnnnnnnnnnnnnnnnnnnnnnnnnnnnnnnnnnnnnnnnnnnnnnnnnnnnnnnnnnnnnnnnnnnnnnnnnnnnnnnnnnnnnnnnnnnnnnnnnnnnnnnnnnnnnnnnnnnnnnnnnnnnnnnnnnnnnnnnnnnnnnnnnnnnnnnnnnnnnnnnnnnnnnnnnnnnnnnnnnnnnnnnnnnnnnnnnnnnnnnnnnnnnnnnnnnnnnnnnnnnnnnnnnnnnnnnnnnnnnnnnnnnnnnnnnnnnnnnnnnnnnnnnnnnnnnnnnnnnnnnnnnnnnnnnnnnnnnnnnnnnnnnnnnnnnnnnnnnnnnnnnnnnnnnnnnnnnnnnnnnnnnnnnnnnnnnnnnnnnnnnnnnnnnnnnnnnnnnnnnnnnnnnnnnnnnnnnnnnnnnnnnnnnnnnnnnnnnnnnnnnnnnnnnnnnnnnnnnnnnnnnnnnnnnnnnnnnnnnnnnnnnnnnnnnnnnnnnnnnnnnnnnnnnnnnnnnnnnnnnnnnnnnnnnnnnnnnnnnnnnnnnnnnnnnnnnnnnnnnnnnnnnnnnnnnnnnnnnnnnnnnnnnnnnnnnnnnnnnnnnnnnnnnnnnnnnnnnnnnnnnnnnnnnnnnnnnnnnnnnnnnnnnnnnnnnnnnnnnnnnnnnnnnnnnnnnnnnnnnnnnnnnnnnnnnnnnnnnnnnnnnnnnnnnnnnnnnnnnnnnnnnnnnnnnnnnnnnnnnnnnnnnnnnnnnnnnnnnnnnnnnnnnnnnnnnnnnnnnnnnnnnnnnnnnnnnnnnnnnnnnnnnnnnnnnnnnnnnnnnnnnnnnnnnnnnnnnnnnnnnnnnnnnnnnnnnnnnnnnnnnnnnnnnnnnnnnnnnnnnnnnnnnnnnnnnnnnnnnnnnnnnnnnnnnnnnnnnnnnnnnnnnnnnnnnnnnnnnnnnnnnnnnnnnnnnnnnnnnnnnnnnnnnnnnnnnnnnnnnnnnnnnnnnnnnnnnnnnnnnnnnnnnnnnnnnnnnnnnnnnnnnnnnnnnnnnnnnnnnnnnnnnnnnnnnnnnnnnnnnnnnnnnnnnnnnnnnnnnnnnnnnnnnnnnnnnnnnnnnnnnnnnnnnnnnnnnnnnnnnnnnnnnnnnnnnnnnnnnnnnnnnnnnnnnnnnnnnnnnnnnnnnnnnnnnnnnnnnnnnnnnnnnnnnnnnnnnnnnnnnnnnnnnnnnnnnnnnnnnnnnnnnnnnnnnnnnnnnnnnnnnnnnnnnnnnnnnnnnnnnnnnnnnnnnnnnnnnnnnnnnnnnnnnnnnnnnnnnnnnnnnnnnnnnnnnnnnnnnnnnnnnnnnnnnnnnnnnnnnnnnnnnnnnnnnnnnnnnnnnnnnnnnnnnnnnnnnnnnnnnnnnnnnnnnnnnnnnnnnnnnnnnnnnnnnnnnnnnnnnnnnnnnnnnnnnnnnnnnnnnnnnnnnnnnnnnnnnnnnnnnnnnnnnnnnnnnnnnnnnnnnnnnnnnnnnnnnnnnnnnnnnnnnnnnnnnnnnnnnnnnnnnnnnnnnnnnnnnnnnnnnnnnnnnnnnnnnnnnnnnnnnnnnnnnnnnnnnnnnnnnnnnnnnnnnnnnnnnnnnnnnnnnnnnnnnnnnnnnnnnnnnnnnnnnnnnnnnnnnnnnnnnnnnnnnnnnnnnnnnnnnnnnnnnnnnnnnnnnnnnnnnnnnnnnnnnnnnnnnnnnnnnnnnnnnnnnnnnnnnnnnnnnnnnnnnnnnnnnnnnnnnnnnnnnnnnnnnnnnnnnnnnnnnnnnnnnnnnnnnnnnnnnnnnnnnnnnnnnnnnnnnnnnnnnnnnnnnnnnnnnnnnnnnnnnnnnnnnnnnnnnnnnnnnnnnnnnnnnnnnnnnnnnnnnnnnnnnnnnnnnnnnnnnnnnnnnnnnnnnnnnnnnnnnnnnnnnnnnnnnnnnnnnnnnnnnnnnnnnnnnnnnnnnnnnnnnnnnnnnnnnnnnnnnnnnnnnnnnnnnnnnnnnnnnnnnnnnnnnnnnnnnnnnnnnnnnnnnnnnnnnnnnnnnnnnnnnnnnnnnnnnnnnnnnnnnnnnnnnnnnnnnnnnnnnnnnnnnnnnnnnnnnnnnnnnnnnnnnnnnnnnnnnnnnnnnnnnnnnnnnnnnnnnnnnnnnnnnnnnnnnnnnnnnnnnnnnnnnnnnnnnnnnnnnnnnnnnnnnnnnnnnnnnnnnnnnnnnnnnnnnnnnnnnnnnnnnnnnnnnnnnnnnnnnnnnnnnnnnnnnnnnnnnnnnnnnnnnnnnnnnnnnnnnnnnnnnnnnnnnnnnnnnnnnnnnnnnnnnnnnnnnnnnnnnnnnnnnnnnnnnnnnnnnnnnnnnnnnnnnnnnnnnnnnnnnnnnnnnnnnnnnnnnnnnnnnnnnnnnnnnnnnnnnnnnnnnnnnnnnnnnnnnnnnnnnnnnnnnnnnnnnnnnnnnnnnnnnnnnnnnnnnnnnnnnnnnnnnnnnnnnnnnnnnnnnnnnnnnnnnnnnnnnnnnnnnnnnnnnnnnnnnnnnnnnnnnnnnnnnnnnnnnnnnnnnnnnnnnnnnnnnnnnnnnnnnnnnnnnnnnnnnnnnnnnnnnnnnnnnnnnnnnnnnnnnnnnnnnnnnnnnnnnnnnnnnnnnnnnnnnnnnnnnnnnnnnnnnnnnnnnnnnnnnnnnnnnnnnnnnnnnnnnnnnnnnnnnnnnnnnnnnnnnnnnnnnnnnnnnnnnnnnnnnnnnnnnnnnnnnnnnnnnnnnnnnnnnnnnnnnnnnnnnnnnnnnnnnnnnnnnnnnnnnnnnnnnnnnnnnnnnnnnnnnnnnnnnnnnnnnnnnnnnnnnnnnnnnnnnnnnnnnnnnnnnnnnnnnnnnnnnnnnnnnnnnnnnnnnnnnnnnnnnnnnnnnnnnnnnnnnnnnnnnnnnnnnnnnnnnnnnnnnnnnnnnnnnnnnnnnnnnnnnnnnnnnnnnnnnnnnnnnnnnnnnnnnnnnnnnnnnnnnnnnnnnnnnnnnnnnnnnnnnnnnnnnnnnnnnnnnnnnnnnnnnnnnnnnnnnnnnnnnnnnnnnnnnnnnnnnnnnnnnnnnnnnnnnnnnnnnnnnnnnnnnnnnnnnnnnnnnnnnnnnnnnnnnnnnnnnnnnnnnnnnnnnnnnnnnnnnnnnnnnnnnnnnnnnnnnnnnnnnnnnnnnnnnnnnnnnnnnnnnnnnnnnnnnnnnnnnnnnnnnnnnnnnnnnnnnnnnnnnnnnnnnnnnnnnnnnnnnnnnnnnnnnnnnnnnnnnnnnnnnnnnnnnnnnnnnnnnnnnnnnnnnnnnnnnnnnnnnnnnnnnnnnnnnnnnnnnnnnnnnnnnnnnnnnnnnnnnnnnnnnnnnnnnnnnnnnnnnnnnnnnnnnnnnnnnnnnnnnnnnnnnnnnnnnnnnnnnnnnnnnnnnnnnnnnnnnnnnnnnnnnnnnnnnnnnnnnnnnnnnnnnnnnnnnnnnnnnnnnnnnnnnnnnnnnnnnnnnnnnnnnnnnnnnnnnnnnnnnnnnnnnnnnnnnnnnnnnnnnnnnnnnnnnnnnnnnnnnnnnnnnnnnnnnnnnnnnnnnnnnnnnnnnnnnnnnnnnnnnnnnnnnnnnnnnnnnnnnnnnnnnnnnnnnnnnnnnnnnnnnnnnnnnnnnnnnnnnnnnnnnnnnnnnnnnnnnnnnnnnnnnnnnnnnnnnnnnnnnnnnnnnnnnnnnnnnnnnnnnnnnnnnnnnnnnnnnnnnnnnnnnnnnnnnnnnnnnnnnnnnnnnnnnnnnnnnnnnnnnnnnnnnnnnnnnnnnnnnnnnnnnnnnnnnnnnnnnnnnnnnnnnnnnnnnnnnnnnnnnnnnnnnnnnnnnnnnnnnnnnnnnnnnnnnnnnnnnnnnnnnnnnnnnnnnnnnnnnnnnnnnnnnnnnnnnnnnnnnnnnnnnnnnnnnnnnnnnnnnnnnnnnnnnnnnnnnnnnnnnnnnnnnnnnnnnnnnnnnnnnnnnnnnnnnnnnnnnnnnnnnnnnnnnnnnnnnnnnnnnnnnnnnnnnnnnnnnnnnnnnnnnnnnnnnnnnnnnnnnnnnnnnnnnnnnnnnnnnnnnnnnnnnnnnnnnnnnnnnnnnnnnnnnnnnnnnnnnnnnnnnnnnnnnnnnnnnnnnnnnnnnnnnnnnnnnnnnnnnnnnnnnnnnnnnnnnnnnnnnnnnnnnnnnnnnnnnnnnnnnnnnnnnnnnnnnnnnnnnnnnnnnnnnnnnnnnnnnnnnnnnnnnnnnnnnnnnnnnnnnnnnnnnnnnnnnnnnnnnnnnnnnnnnnnnnnnnnnnnnnnnnnnnnnnnnnnnnnnnnnnnnnnnnnnnnnnnnnnnnnnnnnnnnnnnnnnnnnnnnnnnnnnnnnnnnnnnnnnnnnnnnnnnnnnnnnnnnnnnnnnnnnnnnnnnnnnnnnnnnnnnnnnnnnnnnnnnnnnnnnnnnnnnnnnnnnnnnnnnnnnnnnnnnnnnnnnnnnnnnnnnnnnnnnnnnnnnnnnnnnnnnnnnnnnnnnnnnnnnnnnnnnnnnnnnnnnnnnnnnnnnnnnnnnnnnnnnnnnnnnnnnnnnnnnnnnnnnnnnnnnnnnnnnnnnnnnnnnnnnnnnnnnnnnnnnnnnnnnnnnnnnnnnnnnnnnnnnnnnnnnnnnnnnnnnnnnnnnnnnnnnnnnnnnnnnnnnnnnnnnnnnnnnnnnnnnnnnnnnnnnnnnnnnnnnnnnnnnnnnnnnnnnnnnnnnnnnnnnnnnnnnnnnnnnnnnnnnnnnnnnnnnnnnnnnnnnnnnnnnnnnnnnnnnnnnnnnnnnnnnnnnnnnnnnnnnnnnnnnnnnnnnnnnnnnnnnnnnnnnnnnnnnnnnnnnnnnnnnnnnnnnnnnnnnnnnnnnnnnnnnnnnnnnnnnnnnnnnnnnnnnnnnnnnnnnnnnnnnnnnnnnnnnnnnnnnnnnnnnnnnnnnnnnnnnnnnnnnnnnnnnnnnnnnnnnnnnnnnnnnnnnnnnnnnnnnnnnnnnnnnnnnnnnnnnnnnnnnnnnnnnnnnnnnnnnnnnnnnnnnnnnnnnnnnnnnnnnnnnnnnnnnnnnnnnnnnnnnnnnnnnnnnnnnnnnnnnnnnnnnnnnnnnnnnnnnnnnnnnnnnnnnnnnnnnnnnnnnnnnnnnnnnnnnnnnnnnnnnnnnnnnnnnnnnnnnnnnnnnnnnnnnnnnnnnnnnnnnnnnnnnnnnnnnnnnnnnnnnnnnnnnnnnnnnnnnnnnnnnnnnnnnnnnnnnnnnnnnnnnnnnnnnnnnnnnnnnnnnnnnnnnnnnnnnnnnnnnnnnnnnnnnnnnnnnnnnnnnnnnnnnnnnnnnnnnnnnnnnnnnnnnnnnnnnnnnnnnnnnnnnnnnnnnnnnnnnnnnnnnnnnnnnnnnnnnnnnnnnnnnnnnnnnnnnnnnnnnnnnnnnnnnnnnnnnnnnnnnnnnnnnnnnnnnnnnnnnnnnnnnnnnnnnnnnnnnnnnnnnnnnnnnnnnnnnnnnnnnnnnnnnnnnnnnnnnnnnnnnnnnnnnnnnnnnnnnnnnnnnnnnnnnnnnnnnnnnnnnnnnnnnnnnnnnnnnnnnnnnnnnnnnnnnnnnnnnnnnnnnnnnnnnnnnnnnnnnnnnnnnnnnnnnnnnnnnnnnnnnnnnnnnnnnnnnnnnnnnnnnnnnnnnnnnnnnnnnnnnnnnnnnnnnnnnnnnnnnnnnnnnnnnnnnnnnnnnnnnnnnnnnnnnnnnnnnnnnnnnnnnnnnnnnnnnnnnnnnnnnnnnnnnnnnnnnnnnnnnnnnnnnnnnnnnnnnnnnnnnnnnnnnnnnnnnnnnnnnnnnnnnnnnnnnnnnnnnnnnnnnnnnnnnnnnnnnnnnnnnnnnnnnnnnnnnnnnnnnnnnnnnnnnnnnnnnnnnnnnnnnnnnnnnnnnnnnnnnnnnnnnnnnnnnnnnnnnnnnnnnnnnnnnnnnnnnnnnnnnnnnnnnnnnnnnnnnnnnnnnnnnnnnnnnnnnnnnnnnnnnnnnnnnnnnnnnnnnnnnnnnnnnnnnnnnnnnnnnnnnnnnnnnnnnnnnnnnnnnnnnnnnnnnnnnnnnnnnnnnnnnnnnnnnnnnnnnnnnnnnnnnnnnnnnnnnnnnnnnnnnnnnnnnnnnnnnnnnnnnnnnnnnnnnnnnnnnnnnnnnnnnnnnnnnnnnnnnnnnnnnnnnnnnnnnnnnnnnnnnnnnnnnnnnnnnnnnnnnnnnnnnnnnnnnnnnnnnnnnnnnnnnnnnnnnnnnnnnnnnnnnnnnnnnnnnnnnnnnnnnnnnnnnnnnnnnnnnnnnnnnnnnnnnnnnnnnnnnnnnnnnnnnnnnnnnnnnnnnnnnnnnnnnnnnnnnnnnnnnnnnnnnnnnnnnnnnnnnnnnnnnnnnnnnnnnnnnnnnnnnnnnnnnnnnnnnnnnnnnnnnnnnnnnnnnnnnnnnnnnnnnnnnnnnnnnnnnnnnnnnnnnnnnnnnnnnnnnnnnnnnnnnnnnnnnnnnnnnnnnnnnnnnnnnnnnnnnnnnnnnnnnnnnnnnnnnnnnnnnnnnnnnnnnnnnnnnnnnnnnnnnnnnnnnnnnnnnnnnnnnnnnnnnnnnnnnnnnnnnnnnnnnnnnnnnnnnnnnnnnnnnnnnnnnnnnnnnnnnnnnnnnnnnnnnnnnnnnnnnnnnnnnnnnnnnnnnnnnnnnnnnnnnnnnnnnnnnnnnnnnnnnnnnnnnnnnnnnnnnnnnnnnnnnnnnnnnnnnnnnnnnnnnnnnnnnnnnnnnnnnnnnnnnnnnnnnnnnnnnnnnnnnnnnnnnnnnnnnnnnnnnnnnnnnnnnnnnnnnnnnnnnnnnnnnnnnnnnnnnnnnnnnnnnnnnnnnnnnnnnnnnnnnnnnnnnnnnnnnnnnnnnnnnnnnnnnnnnnnnnnnnnnnnnnnnnnnnnnnnnnnnnnnnnnnnnnnnnnnnnnnnnnnnnnnnnnnnnnnnnnnnnnnnnnnnnnnnnnnnnnnnnnnnnnnnnnnnnnnnnnnnnnnnnnnnnnnnnnnnnnnnnnnnnnnnnnnnnnnnnnnnnnnnnnnnnnnnnnnnnnnnnnnnnnnnnnnnnnnnnnnnnnnnnnnnnnnnnnnnnnnnnnnnnnnnnnnnnnnnnnnnnnnnnnnnnnnnnnnnnnnnnnnnnnnnnnnnnnnnnnnnnnnnnnnnnnnnnnnnnnnnnnnnnnnnnnnnnnnnnnnnnnnnnnnnnnnnnnnnnnnnnnnnnnnnnnnnnnnnnnnnnnnnnnnnnnnnnnnnnnnnnnnnnnnnnnnnnnnnnnnnnnnnnnnnnnnnnnnnnnnnnnnnnnnnnnnnnnnnnnnnnnnnnnnnnnnnnnnnnnnnnnnnnnnnnnnnnnnnnnnnnnnnnnnnnnnnnnnnnnnnnnnnnnnnnnnnnnnnnnnnnnnnnnnnnnnnnnnnnnnnnnnnnnnnnnnnnnnnnnnnnnnnnnnnnnnnnnnnnnnnnnnnnnnnnnnnnnnnnnnnnnnnnnnnnnnnnnnnnnnnnnnnnnnnnnnnnnnnnnnnnnnnnnnnnnnnnnnnnnnnnnnnnnnnnnnnnnnnnnnnnnnnnnnnnnnnnnnnnnnnnnnnnnnnnnnnnnnnnnnnnnnnnnnnnnnnnnnnnnnnnnnnnnnnnnnnnnnnnnnnnnnnnnnnnnnnnnnnnnnnnnnnnnnnnnnnnnnnnnnnnnnnnnnnnnnnnnnnnnnnnnnnnnnnnnnnnnnnnnnnnnnnnnnnnnnnnnnnnnnnnnnnnnnnnnnnnnnnnnnnnnnnnnnnnnnnnnnnnnnnnnnnnnnnnnnnnnnnnnnnnnnnnnnnnnnnnnnnnnnnnnnnnnnnnnnnnnnnnnnnnnnnnnnnnnnnnnnnnnnnnnnnnnnnnnnnnnnnnnnnnnnnnnnnnnnnnnnnnnnnnnnnnnnnnnnnnnnnnnnnnnnnnnnnnnnnnnnnnnnnnnnnnnnnnnnnnnnnnnnnnnnnnnnnnnnnnnnnnnnnnnnnnnnnnnnnnnnnnnnnnnnnnnnnnnnnnnnnnnnnnnnnnnnnnnnnnnnnnnnnnnnnnnnnnnnnnnnnnnnnnnnnnnnnnnnnnnnnnnnnnnnnnnnnnnnnnnnnnnnnnnnnnnnnnnnnnnnnnnnnnnnnnnnnnnnnnnnnnnnnnnnnnnnnnnnnnnnnnnnnnnnnnnnnnnnnnnnnnnnnnnnnnnnnnnnnnnnnnnnnnnnnnnnnnnnnnnnnnnnnnnnnnnnnnnnnnnnnnnnnnnnnnnnnnnnnnnnnnnnnnnnnnnnnnnnnnnnnnnnnnnnnnnnnnnnnnnnnnnnnnnnnnnnnnnnnnnnnnnnnnnnnnnnnnnnnnnnnnnnnnnnnnnnnnnnnnnnnnnnnnnnnnnnnnnnnnnnnnnnnnnnnnnnnnnnnnnnnnnnnnnnnnnnnnnnnnnnnnnnnnnnnnnnnnnnnnnnnnnnnnnnnnnnnnnnnnnnnnnnnnnnnnnnnnnnnnnnnnnnnnnnnnnnnnnnnnnnnnnnnnnnnnnnnnnnnnnnnnnnnnnnnnnnnnnnnnnnnnnnnnnnnnnnnnnnnnnnnnnnnnnnnnnnnnnnnnnnnnnnnnnnnnnnnnnnnnnnnnnnnnnnnnnnnnnnnnnnnnnnnnnnnnnnnnnnnnnnnnnnnnnnnnnnnnnnnnnnnnnnnnnnnnnnnnnnnnnnnnnnnnnnnnnnnnnnnnnnnnnnnnnnnnnnnnnnnnnnnnnnnnnnnnnnnnnnnnnnnnnnnnnnnnnnnnnnnnnnnnnnnnnnnnnnnnnnnnnnnnnnnnnnnnnnnnnnnnnnnnnnnnnnnnnnnnnnnnnnnnnnnnnnnnnnnnnnnnnnnnnnnnnnnnnnnnnnnnnnnnnnnnnnnnnnnnnnnnnnnnnnnnnnnnnnnnnnnnnnnnnnnnnnnnnnnnnnnnnnnnnnnnnnnnnnnnnnnnnnnnnnnnnnnnnnnnnnnnnnnnnnnnnnnnnnnnnnnnnnnnnnnnnnnnnnnnnnnnnnnnnnnnnnnnnnnnnnnnnnnnnnnnnnnnnnnnnnnnnnnnnnnnnnnnnnnnnnnnnnnnnnnnnnnnnnnnnnnnnnnnnnnnnnnnnnnnnnnnnnnnnnnnnnnnnnnnnnnnnnnnnnnnnnnnnnnnnnnnnnnnnnnnnnnnnnnnnnnnnnnnnnnnnnnnnnnnnnnnnnnnnnnnnnnnnnnnnnnnnnnnnnnnnnnnnnnnnnnnnnnnnnnnnnnnnnnnnnnnnnnnnnnnnnnnnnnnnnnnnnnnnnnnnnnnnnnnnnnnnnnnnnnnnnnnnnnnnnnnnnnnnnnnnnnnnnnnnnnnnnnnnnnnnnnnnnnnnnnnnnnnnnnnnnnnnnnnnnnnnnnnnnnnnnnnnnnnnnnnnnnnnnnnnnnnnnnnnnnnnnnnnnnnnnnnnnnnnnnnnnnnnnnnnnnnnnnnnnnnnnnnnnnnnnnnnnnnnnnnnnnnnnnnnnnnnnnnnnnnnnnnnnnnnnnnnnnnnnnnnnnnnnnnnnnnnnnnnnnnnnnnnnnnnnnnnnnnnnnnnnnnnnnnnnnnnnnnnnnnnnnnnnnnnnnnnnnnnnnnnnnnnnnnnnnnnnnnnnnnnnnnnnnnnnnnnnnnnnnnnnnnnnnnnnnnnnnnnnnnnnnnnnnnnnnnnnnnnnnnnnnnnnnnnnnnnnnnnnnnnnnnnnnnnnnnnnnnnnnnnnnnnnnnnnnnnnnnnnnnnnnnnnnnnnnnnnnnnnnnnnnnnnnnnnnnnnnnnnnnnnnnnnnnnnnnnnnnnnnnnnnnnnnnnnnnnnnnnnnnnnnnnnnnnnnnnnnnnnnnnnnnnnnnnnnnnnnnnnnnnnnnnnnnnnnnnnnnnnnnnnnnnnnnnnnnnnnnnnnnnnnnnnnnnnnnnnnnnnnnnnnnnnnnnnnnnnnnnnnnnnnnnnnnnnnnnnnnnnnnnnnnnnnnnnnnnnnnnnnnnnnnnnnnnnnnnnnnnnnnnnnnnnnnnnnnnnnnnnnnnnnnnnnnnnnnnnnnnnnnnnnnnnnnnnnnnnnnnnnnnnnnnnnnnnnnnnnnnnnnnnnnnnnnnnnnnnnnnnnnnnnnnnnnnnnnnnnnnnnnnnnnnnnnnnnnnnnnnnnnnnnnnnnnnnnnnnnnnnnnnnnnnnnnnnnnnnnnnnnnnnnnnnnnnnnnnnnnnnnnnnnnnnnnnnnnnnnnnnnnnnnnnnnnnnnnnnnnnnnnnnnnnnnnnnnnnnnnnnnnnnnnnnnnnnnnnnnnnnnnnnnnnnnnnnnnnnnnnnnnnnnnnnnnnnnnnnnnnnnnnnnnnnnnnnnnnnnnnnnnnnnnnnnnnnnnnnnnnnnnnnnnnnnnnnnnnnnnnnnnnnnnnnnnnnnnnnnnnnnnnnnnnnnnnnnnnnnnnnnnnnnnnnnnnnnnnnnnnnnnnnnnnnnnnnnnnnnnnnnnnnnnnnnnnnnnnnnnnnnnnnnnnnnnnnnnnnnnnnnnnnnnnnnnnnnnnnnnnnnnnnnnnnnnnnnnnnnnnnnnnnnnnnnnnnnnnnnnnnnnnnnnnnnnnnnnnnnnnnnnnnnnnnnnnnnnnnnnnnnnnnnnnnnnnnnnnnnnnnnnnnnnnnnnnnnnnnnnnnnnnnnnnnnnnnnnnnnnnnnnnnnnnnnnnnnnnnnnnnnnnnnnnnnnnnnnnnnnnnnnnnnnnnnnnnnnnnnnnnnnnnnnnnnnnnnnnnnnnnnnnnnnnnnnnnnnnnnnnnnnnnnnnnnnnnnnnnnnnnnnnnnnnnnnnnnnnnnnnnnnnnnnnnnnnnnnnnnnnnnnnnnnnnnnnnnnnnnnnnnnnnnnnnnnnnnnnnnnnnnnnnnnnnnnnnnnnnnnnnnnnnnnnnnnnnnnnnnnnnnnnnnnnnnnnnnnnnnnnnnnnnnnnnnnnnnnnnnnnnnnnnnnnnnnnnnnnnnnnnnnnnnnnnnnnnnnnnnnnnnnnnnnnnnnnnnnnnnnnnnnnnnnnnnnnnnnnnnnnnnnnnnnnnnnnnnnnnnnnnnnnnnnnnnnnnnnnnnnnnnnnnnnnnnnnnnnnnnnnnnnnnnnnnnnnnnnnnnnnnnnnnnnnnnnnnnnnnnnnnnnnnnnnnnnnnnnnnnnnnnnnnnnnnnnnnnnnnnnnnnnnnnnnnnnnnnnnnnnnnnnnnnnnnnnnnnnnnnnnnnnnnnnnnnnnnnnnnnnnnnnnnnnnnnnnnnnnnnnnnnnnnnnnnnnnnnnnnnnnnnnnnnnnnnnnnnnnnnnnnnnnnnnnnnnnnnnnnnnnnnnnnnnnnnnnnnnnnnnnnnnnnnnnnnnnnnnnnnnnnnnnnnnnnnnnnnnnnnnnnnnnnnnnnnnnnnnnnnnnnnnnnnnnnnnnnnnnnnnnnnnnnnnnnnnnnnnnnnnnnnnnnnnnnnnnnnnnnnnnnnnnnnnnnnnnnnnnnnnnnnnnnnnnnnnnnnnnnnnnnnnnnnnnnnnnnnnnnnnnnnnnnnnnnnnnnnnnnnnnnnnnnnnnnnnnnnnnnnnnnnnnnnnnnnnnnnnnnnnnnnnnnnnnnnnnnnnnnnnnnnnnnnnnnnnnnnnnnnnnnnnnnnnnnnnnnnnnnnnnnnnnnnnnnnnnnnnnnnnnnnnnnnnnnnnnnnnnnnnnnnnnnnnnnnnnnnnnnnnnnnnnnnnnnnnnnnnnnnnnnnnnnnnnnnnnnnnnnnnnnnnnnnnnnnnnnnnnnnnnnnnnnnnnnnnnnnnnnnnnnnnnnnnnnnnnnnnnnnnnnnnnnnnnnnnnnnnnnnnnnnnnnnnnnnnnnnnnnnnnnnnnnnnnnnnnnnnnnnnnnnnnnnnnnnnnnnnnnnnnnnnnnnnnnnnnnnnnnnnnnnnnnnnnnnnnnnnnnnnnnnnnnnnnnnnnnnnnnnnnnnnnnnnnnnnnnnnnnnnnnnnnnnnnnnnnnnnnnnnnnnnnnnnnnnnnnnnnnnnnnnnnnnnnnnnnnnnnnnnnnnnnnnnnnnnnnnnnnnnnnnnnnnnnnnnnnnnnnnnnnnnnnnnnnnnnnnnnnnnnnnnnnnnnnnnnnnnnnnnnnnnnnnnnnnnnnnnnnnnnnnnnnnnnnnnnnnnnnnnnnnnnnnnnnnnnnnnnnnnnnnnnnnnnnnnnnnnnnnnnnnnnnnnnnnnnnnnnnnnnnnnnnnnnnnnnnnnnnnnnnnnnnnnnnnnnnnnnnnnnnnnnnnnnnnnnnnnnnnnnnnnnnnnnnnnnnnnnnnnnnnnnnnnnnnnnnnnnnnnnnnnnnnnnnnnnnnnnnnnnnnnnnnnnnnnnnnnnnnnnnnnnnnnnnnnnnnnnnnnnnnnnnnnnnnnnnnnnnnnnnnnnnnnnnnnnnnnnnnnnnnnnnnnnnnnnnnnnnnnnnnnnnnnnnnnnnnnnnnnnnnnnnnnnnnnnnnnnnnnnnnnnnnnnnnnnnnnnnnnnnnnnnnnnnnnnnnnnnnnnnnnnnnnnnnnnnnnnnnnnnnnnnnnnnnnnnnnnnnnnnnnnnnnnnnnnnnnnnnnnnnnnnnnnnnnnnnnnnnnnnnnnnnnnnnnnnnnnnnnnnnnnnnnnnnnnnnnnnnnnnnnnnnnnnnnnnnnnnnnnnnnnnnnnnnnnnnnnnnnnnnnnnnnnnnnnnnnnnnnnnnnnnnnnnnnnnnnnnnnnnnnnnnnnnnnnnnnnnnnnnnnnnnnnnnnnnnnnnnnnnnnnnnnnnnnnnnnnnnnnnnnnnnnnnnnnnnnnnnnnnnnnnnnnnnnnnnnnnnnnnnnnnnnnnnnnnnnnnnnnnnnnnnnnnnnnnnnnnnnnnnnnnnnnnnnnnnnnnnnnnnnnnnnnnnnnnnnnnnnnnnnnnnnnnnnnnnnnnnnnnnnnnnnnnnnnnnnnnnnnnnnnnnnnnnnnnnnnnnnnnnnnnnnnnnnnnnnnnnnnnnnnnnnnnnnnnnnnnnnnnnnnnnnnnnnnnnnnnnnnnnnnnnnnnnnnnnnnnnnnnnnnnnnnnnnnnnnnnnnnnnnnnnnnnnnnnnnnnnnnnnnnnnnnnnnnnnnnnnnnnnnnnnnnnnnnnnnnnnnnnnnnnnnnnnnnnnnnnnnnnnnnnnnnnnnnnnnnnnnnnnnnnnnnnnnnnnnnnnnnnnnnnnnnnnnnnnnnnnnnnnnnnnnnnnnnnnnnnnnnnnnnnnnnnnnnnnnnnnnnnnnnnnnnnnnnnnnnnnnnnnnnnnnnnnnnnnnnnnnnnnnnnnnnnnnnnnnnnnnnnnnnnnnnnnnnnnnnnnnnnnnnnnnnnnnnnnnnnnnnnnnnnnnnnnnnnnnnnnnnnnnnnnnnnnnnnnnnnnnnnnnnnnnnnnnnnnnnnnnnnnnnnnnnnnnnnnnnnnnnnnnnnnnnnnnnnnnnnnnnnnnnnnnnnnnnnnnnnnnnnnnnnnnnnnnnnnnnnnnnnnnnnnnnnnnnnnnnnnnnnnnnnnnnnnnnnnnnnnnnnnnnnnnnnnnnnnnnnnnnnnnnnnnnnnnnnnnnnnnnnnnnnnnnnnnnnnnnnnnnnnnnnnnnnnnnnnnnnnnnnnnnnnnnnnnnnnnnnnnnnnnnnnnnnnnnnnnnnnnnnnnnnnnnnnnnnnnnnnnnnnnnnnnnnnnnnnnnnnnnnnnnnnnnnnnnnnnnnnnnnnnnnnnnnnnnnnnnnnnnnnnnnnnnnnnnnnnnnnnnnnnnnnnnnnnnnnnnnnnnnnnnnnnnnnnnnnnnnnnnnnnnnnnnnnnnnnnnnnnnnnnnnnnnnnnnnnnnnnnnnnnnnnnnnnnnnnnnnnnnnnnnnnnnnnnnnnnnnnnnnnnnnnnnnnnnnnnnnnnnnnnnnnnnnnnnnnnnnnnnnnnnnnnnnnnnnnnnnnnnnnnnnnnnnnnnnnnnnnnnnnnnnnnnnnnnnnnnnnnnnnnnnnnnnnnnnnnnnnnnnnnnnnnnnnnnnnnnnnnnnnnnnnnnnnnnnnnnnnnnnnnnnnnnnnnnnnnnnnnnnnnnnnnnnnnnnnnnnnnnnnnnnnnnnnnnnnnnnnnnnnnnnnnnnnnnnnnnnnnnnnnnnnnnnnnnnnnnnnnnnnnnnnnnnnnnnnnnnnnnnnnnnnnnnnnnnnnnnnnnnnnnnnnnnnnnnnnnnnnnnnnnnnnnnnnnnnnnnnnnnnnnnnnnnnnnnnnnnnnnnnnnnnnnnnnnnnnnnnnnnnnnnnnnnnnnnnnnnnnnnnnnnnnnnnnnnnnnnnnnnnnnnnnnnnnnnnnnnnnnnnnnnnnnnnnnnnnnnnnnnnnnnnnnnnnnnnnnnnnnnnnnnnnnnnnnnnnnnnnnnnnnnnnnnnnnnnnnnnnnnnnnnnnnnnnnnnnnnnnnnnnnnnnnnnnnnnnnnnnnnnnnnnnnnnnnnnnnnnnnnnnnnnnnnnnnnnnnnnnnnnnnnnnnnnnnnnnnnnnnnnnnnnnnnnnnnnnnnnnnnnnnnnnnnnnnnnnnnnnnnnnnnnnnnnnnnnnnnnnnnnnnnnnnnnnnnnnnnnnnnnnnnnnnnnnnnnnnnnnnnnnnnnnnnnnnnnnnnnnnnnnnnnnnnnnnnnnnnnnnnnnnnnnnnnnnnnnnnnnnnnnnnnnnnnnnnnnnnnnnnnnnnnnnnnnnnnnnnnnnnnnnnnnnnnnnnnnnnnnnnnnnnnnnnnnnnnnnnnnnnnnnnnnnnnnnnnnnnnnnnnnnnnnnnnnnnnnnnnnnnnnnnnnnnnnnnnnnnnnnnnnnnnnnnnnnnnnnnnnnnnnnnnnnnnnnnnnnnnnnnnnnnnnnnnnnnnnnnnnnnnnnnnnnnnnnnnnnnnnnnnnnnnnnnnnnnnnnnnnnnnnnnnnnnnnnnnnnnnnnnnnnnnnnnnnnnnnnnnnnnnnnnnnnnnnnnnnnnnnnnnnnnnnnnnnnnnnnnnnnnnnnnnnnnnnnnnnnnnnnnnnnnnnnnnnnnnnnnnnnnnnnnnnnnnnnnnnnnnnnnnnnnnnnnnnnnnnnnnnnnnnnnnnnnnnnnnnnnnnnnnnnnnnnnnnnnnnnnnnnnnnnnnnnnnnnnnnnnnnnnnnnnnnnnnnnnnnnnnnnnnnnnnnnnnnnnnnnnnnnnnnnnnnnnnnnnnnnnnnnnnnnnnnnnnnnnnnnnnnnnnnnnnnnnnnnnnnnnnnnnnnnnnnnnnnnnnnnnnnnnnnnnnnnnnnnnnnnnnnnnnnnnnnnnnnnnnnnnnnnnnnnnnnnnnnnnnnnnnnnnnnnnnnnnnnnnnnnnnnnnnnnnnnnnnnnnnnnnnnnnnnnnnnnnnnnnnnnnnnnnnnnnnnnnnnnnnnnnnnnnnnnnnnnnnnnnnnnnnnnnnnnnnnnnnnnnnnnnnnnnnnnnnnnnnnnnnnnnnnnnnnnnnnnnnnnnnnnnnnnnnnnnnnnnnnnnnnnnnnnnnnnnnnnnnnnnnnnnnnnnnnnnnnnnnnnnnnnnnnnnnnnnnnnnnnnnnnnnnnnnnnnnnnnnnnnnnnnnnnnnnnnnnnnnnnnnnnnnnnnnnnnnnnnnnnnnnnnnnnnnnnnnnnnnnnnnnnnnnnnnnnnnnnnnnnnnnnnnnnnnnnnnnnnnnnnnnnnnnnnnnnnnnnnnnnnnnnnnnnnnnnnnnnnnnnnnnnnnnnnnnnnnnnnnnnnnnnnnnnnnnnnnnnnnnnnnnnnnnnnnnnnnnnnnnnnnnnnnnnnnnnnnnnnnnnnnnnnnnnnnnnnnnnnnnnnnnnnnnnnnnnnnnnnnnnnnnnnnnnnnnnnnnnnnnnnnnnnnnnnnnnnnnnnnnnnnnnnnnnnnnnnnnnnnnnnnnnnnnnnnnnnnnnnnnnnnnnnnnnnnnnnnnnnnnnnnnnnnnnnnnnnnnnnnnnnnnnnnnnnnnnnnnnnnnnnnnnnnnnnnnnnnnnnnnnnnnnnnnnnnnnnnnnnnnnnnnnnnnnnnnnnnnnnnnnnnnnnnnnnnnnnnnnnnnnnnnnnnnnnnnnnnnnnnnnnnnnnnnnnnnnnnnnnnnnnnnnnnnnnnnnnnnnnnnnnnnnnnnnnnnnnnnnnnnnnnnnnnnnnnnnnnnnnnnnnnnnnnnnnnnnnnnnnnnnnnnnnnnnnnnnnnnnnnnnnnnnnnnnnnnnnnnnnnnnnnnnnnnnnnnnnnnnnnnnnnnnnnnnnnnnnnnnnnnnnnnnnnnnnnnnnnnnnnnnnnnnnnnnnnnnnnnnnnnnnnnnnnnnnnnnnnnnnnnnnnnnnnnnnnnnnnnnnnnnnnnnnnnnnnnnnnnnnnnnnnnnnnnnnnnnnnnnnnnnnnnnnnnnnnnnnnnnnnnnnnnnnnnnnnnnnnnnnnnnnnnnnnnnnnnnnnnnnnnnnnnnnnnnnnnnnnnnnnnnnnnnnnnnnnnnnnnnnnnnnnnnnnnnnnnnnnnnnnnnnnnnnnnnnnnnnnnnnnnnnnnnnnnnnnnnnnnnnnnnnnnnnnnnnnnnnnnnnnnnnnnnnnnnnnnnnnnnnnnnnnnnnnnnnnnnnnnnnnnnnnnnnnnnnnnnnnnnnnnnnnnnnnnnnnnnnnnnnnnnnnnnnnnnnnnnnnnnnnnnnnnnnnnnnnnnnnnnnnnnnnnnnnnnnnnnnnnnnnnnnnnnnnnnnnnnnnnnnnnnnnnnnnnnnnnnnnnnnnnnnnnnnnnnnnnnnnnnnnnnnnnnnnnnnnnnnnnnnnnnnnnnnnnnnnnnnnnnnnnnnnnnnnnnnnnnnnnnnnnnnnnnnnnnnnnnnnnnnnnnnnnnnnnnnnnnnnnnnnnnnnnnnnnnnnnnnnnnnnnnnnnnnnnnnnnnnnnnnnnnnnnnnnnnnnnnnnnnnnnnnnnnnnnnnnnnnnnnnnnnnnnnnnnnnnnnnnnnnnnnnnnnnnnnnnnnnnnnnnnnnnnnnnnnnnnnnnnnnnnnnnnnnnnnnnnnnnnnnnnnnnnnnnnnnnnnnnnnnnnnnnnnnnnnnnnnnnnnnnnnnnnnnnnnnnnnnnnnnnnnnnnnnnnnnnnnnnnnnnnnnnnnnnnnnnnnnnnnnnnnnnnnnnnnnnnnnnnnnnnnnnnnnnnnnnnnnnnnnnnnnnnnnnnnnnnnnnnnnnnnnnnnnnnnnnnnnnnnnnnnnnnnnnnnnnnnnnnnnnnnnnnnnnnnnnnnnnnnnnnnnnnnnnnnnnnnnnnnnnnnnnnnnnnnnnnnnnnnnnnnnnnnnnnnnnnnnnnnnnnnnnnnnnnnnnnnnnnnnnnnnnnnnnnnnnnnnnnnnnnnnnnnnnnnnnnnnnnnnnnnnnnnnnnnnnnnnnnnnnnnnnnnnnnnnnnnnnnnnnnnnnnnnnnnnnnnnnnnnnnnnnnnnnnnnnnnnnnnnnnnnnnnnnnnnnnnnnnnnnnnnnnnnnnnnnnnnnnnnnnnnnnnnnnnnnnnnnnnnnnnnnnnnnnnnnnnnnnnnnnnnnnnnnnnnnnnnnnnnnnnnnnnnnnnnnnnnnnnnnnnnnnnnnnnnnnnnnnnnnnnnnnnnnnnnnnnnnnnnnnnnnnnnnnnnnnnnnnnnnnnnnnnnnnnnnnnnnnnnnnnnnnnnnnnnnnnnnnnnnnnnnnnnnnnnnnnnnnnnnnnnnnnnnnnnnnnnnnnnnnnnnnnnnnnnnnnnnnnnnnnnnnnnnnnnnnnnnnnnnnnnnnnnnnnnnnnnnnnnnnnnnnnnnnnnnnnnnnnnnnnnnnnnnnnnnnnnnnnnnnnnnnnnnnnnnnnnnnnnnnnnnnnnnnnnnnnnnnnnnnnnnnnnnnnnnnnnnnnnnnnnnnnnnnnnnnnnnnnnnnnnnnnnnnnnnnnnnnnnnnnnnnnnnnnnnnnnnnnnnnnnnnnnnnnnnnnnnnnnnnnnnnnnnnnnnnnnnnnnnnnnnnnnnnnnnnnnnnnnnnnnnnnnnnnnnnnnnnnnnnnnnnnnnnnnnnnnnnnnnnnnnnnnnnnnnnnnnnnnnnnnnnnnnnnnnnnnnnnnnnnnnnnnnnnnnnnnnnnnnnnnnnnnnnnnnnnnnnnnnnnnnnnnnnnnnnnnnnnnnnnnnnnnnnnnnnnnnnnnnnnnnnnnnnnnnnnnnnnnnnnnnnnnnnnnnnnnnnnnnnnnnnnnnnnnnnnnnnnnnnnnnnnnnnnnnnnnnnnnnnnnnnnnnnnnnnnnnnnnnnnnnnnnnnnnnnnnnnnnnnnnnnnnnnnnnnnnnnnnnnnnnnnnnnnnnnnnnnnnnnnnnnnnnnnnnnnnnnnnnnnnnnnnnnnnnnnnnnnnnnnnnnnnnnnnnnnnnnnnnnnnnnnnnnnnnnnnnnnnnnnnnnnnnnnnnnnnnnnnnnnnnnnnnnnnnnnnnnnnnnnnnnnnnnnnnnnnnnnnnnnnnnnnnnnnnnnnnnnnnnnnnnnnnnnnnnnnnnnnnnnnnnnnnnnnnnnnnnnnnnnnnnnnnnnnnnnnnnnnnnnnnnnnnnnnnnnnnnnnnnnnnnnnnnnnnnnnnnnnnnnnnnnnnnnnnnnnnnnnnnnnnnnnnnnnnnnnnnnnnnnnnnnnnnnnnnnnnnnnnnnnnnnnnnnnnnnnnnnnnnnnnnnnnnnnnnnnnnnnnnnnnnnnnnnnnnnnnnnnnnnnnnnnnnnnnnnnnnnnnnnnnnnnnnnnnnnnnnnnnnnnnnnnnnnnnnnnnnnnnnnnnnnnnnnnnnnnnnnnnnnnnnnnnnnnnnnnnnnnnnnnnnnnnnnnnnnnnnnnnnnnnnnnnnnnnnnnnnnnnnnnnnnnnnnnnnnnnnnnnnnnnnnnnnnnnnnnnnnnnnnnnnnnnnnnnnnnnnnnnnnnnnnnnnnnnnnnnnnnnnnnnnnnnnnnnnnnnnnnnnnnnnnnnnnnnnnnnnnnnnnnnnnnnnnnnnnnnnnnnnnnnnnnnnnnnnnnnnnnnnnnnnnnnnnnnnnnnnnnnnnnnnnnnnnnnnnnnnnnnnnnnnnnnnnnnnnnnnnnnnnnnnnnnnnnnnnnnnnnnnnnnnnnnnnnnnnnnnnnnnnnnnnnnnnnnnnnnnnnnnnnnnnnnnnnnnnnnnnnnnnnnnnnnnnnnnnnnnnnnnnnnnnnnnnnnnnnnnnnnnnnnnnnnnnnnnnnnnnnnnnnnnnnnnnnnnnnnnnnnnnnnnnnnnnnnnnnnnnnnnnnnnnnnnnnnnnnnnnnnnnnnnnnnnnnnnnnnnnnnnnnnnnnnnnnnnnnnnnnnnnnnnnnnnnnnnnnnnnnnnnnnnnnnnnnnnnnnnnnnnnnnnnnnnnnnnnnnnnnnnnnnnnnnnnnnnnnnnnnnnnnnnnnnnnnnnnnnnnnnnnnnnnnnnnnnnnnnnnnnnnnnnnnnnnnnnnnnnnnnnnnnnnnnnnnnnnnnnnnnnnnnnnnnnnnnnnnnnnnnnnnnnnnnnnnnnnnnnnnnnnnnnnnnnnnnnnnnnnnnnnnnnnnnnnnnnnnnnnnnnnnnnnnnnnnnnnnnnnnnnnnnnnnnnnnnnnnnnnnnnnnnnnnnnnnnnnnnnnnnnnnnnnnnnnnnnnnnnnnnnnnnnnnnnnnnnnnnnnnnnnnnnnnnnnnnnnnnnnnnnnnnnnnnnnnnnnnnnnnnnnnnnnnnnnnnnnnnnnnnnnnnnnnnnnnnnnnnnnnnnnnnnnnnnnnnnnnnnnnnnnnnnnnnnnnnnnnnnnnnnnnnnnnnnnnnnnnnnnnnnnnnnnnnnnnnnnnnnnnnnnnnnnnnnnnnnnnnnnnnnnnnnnnnnnnnnnnnnnnnnnnnnnnnnnnnnnnnnnnnnnnnnnnnnnnnnnnnnnnnnnnnnnnnnnnnnnnnnnnnnnnnnnnnnnnnnnnnnnnnnnnnnnnnnnnnnnnnnnnnnnnnnnnnnnnnnnnnnnnnnnnnnnnnnnnnnnnnnnnnnnnnnnnnnnnnnnnnnnnnnnnnnnnnnnnnnnnnnnnnnnnnnnnnnnnnnnnnnnnnnnnnnnnnnnnnnnnnnnnnnnnnnnnnnnnnnnnnnnnnnnnnnnnnnnnnnnnnnnnnnnnnnnnnnnnnnnnnnnnnnnnnnnnnnnnnnnnnnnnnnnnnnnnnnnnnnnnnnnnnnnnnnnnnnnnnnnnnnnnnnnnnnnnnnnnnnnnnnnnnnnnnnnnnnnnnnnnnnnnnnnnnnnnnnnnnnnnnnnnnnnnnnnnnnnnnnnnnnnnnnnnnnnnnnnnnnnnnnnnnnnnnnnnnnnnnnnnnnnnnnnnnnnnnnnnnnnnnnnnnnnnnnnnnnnnnnnnnnnnnnnnnnnnnnnnnnnnnnnnnnnnnnnnnnnnnnnnnnnnnnnnnnnnnnnnnnnnnnnnnnnnnnnnnnnnnnnnnnnnnnnnnnnnnnnnnnnnnnnnnnnnnnnnnnnnnnnnnnnnnnnnnnnnnnnnnnnnnnnnnnnnnnnnnnnnnnnnnnnnnnnnnnnnnnnnnnnnnnnnnnnnnnnnnnnnnnnnnnnnnnnnnnnnnnnnnnnnnnnnnnnnnnnnnnnnnnnnnnnnnnnnnnnnnnnnnnnnnnnnnnnnnnnnnnnnnnnnnnnnnnnnnnnnnnnnnnnnnnnnnnnnnnnnnnnnnnnnnnnnnnnnnnnnnnnnnnnnnnnnnnnnnnnnnnnnnnnnnnnnnnnnnnnnnnnnnnnnnnnnnnnnnnnnnnnnnnnnnnnnnnnnnnnnnnnnnnnnnnnnnnnnnnnnnnnnnnnnnnnnnnnnnnnnnnnnnnnnnnnnnnnnnnnnnnnnnnnnnnnnnnnnnnnnnnnnnnnnnnnnnnnnnnnnnnnnnnnnnnnnnnnnnnnnnnnnnnnnnnnnnnnnnnnnnnnnnnnnnnnnnnnnnnnnnnnnnnnnnnnnnnnnnnnnnnnnnnnnnnnnnnnnnnnnnnnnnnnnnnnnnnnnnnnnnnnnnnnnnnnnnnnnnnnnnnnnnnnnnnnnnnnnnnnnnnnnnnnnnnnnnnnnnnnnnnnnnnnnnnnnnnnnnnnnnnnnnnnnnnnnnnnnnnnnnnnnnnnnnnnnnnnnnnnnnnnnnnnnnnnnnnnnnnnnnnnnnnnnnnnnnnnnnnnnnnnnnnnnnnnnnnnnnnnnnnnnnnnnnnnnnnnnnnnnnnnnnnnnnnnnnnnnnnnnnnnnnnnnnnnnnnnnnnnnnnnnnnnnnnnnnnnnnnnnnnnnnnnnnnnnnnnnnnnnnnnnnnnnnnnnnnnnnnnnnnnnnnnnnnnnnnnnnnnnnnnnnnnnnnnnnnnnnnnnnnnnnnnnnnnnnnnnnnnnnnnnnnnnnnnnnnnnnnnnnnnnnnnnnnnnnnnnnnnnnnnnnnnnnnnnnnnnnnnnnnnnnnnnnnnnnnnnnnnnnnnnnnnnnnnnnnnnnnnnnnnnnnnnnnnnnnnnnnnnnnnnnnnnnnnnnnnnnnnnnnnnnnnnnnnnnnnnnnnnnnnnnnnnnnnnnnnnnnnnnnnnnnnnnnnnnnnnnnnnnnnnnnnnnnnnnnnnnnnnnnnnnnnnnnnnnnnnnnnnnnnnnnnnnnnnnnnnnnnnnnnnnnnnnnnnnnnnnnnnnnnnnnnnnnnnnnnnnnnnnnnnnnnnnnnnnnnnnnnnnnnnnnnnnnnnnnnnnnnnnnnnnnnnnnnnnnnnnnnnnnnnnnnnnnnnnnnnnnnnnnnnnnnnnnnnnnnnnnnnnnnnnnnnnnnnnnnnnnnnnnnnnnnnnnnnnnnnnnnnnnnnnnnnnnnnnnnnnnnnnnnnnnnnnnnnnnnnnnnnnnnnnnnnnnnnnnnnnnnnnnnnnnnnnnnnnnnnnnnnnnnnnnnnnnnnnnnnnnnnnnnnnnnnnnnnnnnnnnnnnnnnnnnnnnnnnnnnnnnnnnnnnnnnnnnnnnnnnnnnnnnnnnnnnnnnnnnnnnnnnnnnnnnnnnnnnnnnnnnnnnnnnnnnnnnnnnnnnnnnnnnnnnnnnnnnnnnnnnnnnnnnnnnnnnnnnnnnnnnnnnnnnnnnnnnnnnnnnnnnnnnnnnnnnnnnnnnnnnnnnnnnnnnnnnnnnnnnnnnnnnnnnnnnnnnnnnnnnnnnnnnnnnnnnnnnnnnnnnnnnnnnnnnnnnnnnnnnnnnnnnnnnnnnnnnnnnnnnnnnnnnnnnnnnnnnnnnnnnnnnnnnnnnnnnnnnnnnnnnnnnnnnnnnnnnnnnnnnnnnnnnnnnnnnnnnnnnnnnnnnnnnnnnnnnnnnnnnnnnnnnnnnnnnnnnnnnnnnnnnnnnnnnnnnnnnnnnnnnnnnnnnnnnnnnnnnnnnnnnnnnnnnnnnnnnnnnnnnnnnnnnnnnnnnnnnnnnnnnnnnnnnnnnnnnnnnnnnnnnnnnnnnnnnnnnnnnnnnnnnnnnnnnnnnnnnnnnnnnnnnnnnnnnnnnnnnnnnnnnnnnnnnnnnnnnnnnnnnnnnnnnnnnnnnnnnnnnnnnnnnnnnnnnnnnnnnnnnnnnnnnnnnnnnnnnnnnnnnnnnnnnnnnnnnnnnnnnnnnnnnnnnnnnnnnnnnnnnnnnnnnnnnnnnnnnnnnnnnnnnnnnnnnnnnnnnnnnnnnnnnnnnnnnnnnnnnnnnnnnnnnnnnnnnnnnnnnnnnnnnnnnnnnnnnnnnnnnnnnnnnnnnnnnnnnnnnnnnnnnnnnnnnnnnnnnnnnnnnnnnnnnnnnnnnnnnnnnnnnnnnnnnnnnnnnnnnnnnnnnnnnnnnnnnnnnnnnnnnnnnnnnnnnnnnnnnnnnnnnnnnnnnnnnnnnnnnnnnnnnnnnnnnnnnnnnnnnnnnnnnnnnnnnnnnnnnnnnnnnnnnnnnnnnnnnnnnnnnnnnnnnnnnnnnnnnnnnnnnnnnnnnnnnnnnnnnnnnnnnnnnnnnnnnnnnnnnnnnnnnnnnnnnnnnnnnnnnnnnnnnnnnnnnnnnnnnnnnnnnnnnnnnnnnnnnnnnnnnnnnnnnnnnnnnnnnnnnnnnnnnnnnnnnnnnnnnnnnnnnnnnnnnnnnnnnnnnnnnnnnnnnnnnnnnnnnnnnnnnnnnnnnnnnnnnnnnnnnnnnnnnnnnnnnnnnnnnnnnnnnnnnnnnnnnnnnnnnnnnnnnnnnnnnnnnnnnnnnnnnnnnnnnnnnnnnnnnnnnnnnnnnnnnnnnnnnnnnnnnnnnnnnnnnnnnnnnnnnnnnnnnnnnnnnnnnnnnnnnnnnnnnnnnnnnnnnnnnnnnnnnnnnnnnnnnnnnnnnnnnnnnnnnnnnnnnnnnnnnnnnnnnnnnnnnnnnnnnnnnnnnnnnnnnnnnnnnnnnnnnnnnnnnnnnnnnnnnnnnnnnnnnnnnnnnnnnnnnnnnnnnnnnnnnnnnnnnnnnnnnnnnnnnnnnnnnnnnnnnnnnnnnnnnnnnnnnnnnnnnnnnnnnnnnnnnnnnnnnnnnnnnnnnnnnnnnnnnnnnnnnnnnnnnnnnnnnnnnnnnnnnnnnnnnnnnnnnnnnnnnnnnnnnnnnnnnnnnnnnnnnnnnnnnnnnnnnnnnnnnnnnnnnnnnnnnnnnnnnnnnnnnnnnnnnnnnnnnnnnnnnnnnnnnnnnnnnnnnnnnnnnnnnnnnnnnnnnnnnnnnnnnnnnnnnnnnnnnnnnnnnnnnnnnnnnnnnnnnnnnnnnnnnnnnnnnnnnnnnnnnnnnnnnnnnnnnnnnnnnnnnnnnnnnnnnnnnnnnnnnnnnnnnnnnnnnnnnnnnnnnnnnnnnnnnnnnnnnnnnnnnnnnnnnnnnnnnnnnnnnnnnnnnnnnnnnnnnnnnnnnnnnnnnnnnnnnnnnnnnnnnnnnnnnnnnnnnnnnnnnnnnnnnnnnnnnnnnnnnnnnnnnnnnnnnnnnnnnnnnnnnnnnnnnnnnnnnnnnnnnnnnnnnnnnnnnnnnnnnnnnnnnnnnnnnnnnnnnnnnnnnnnnnnnnnnnnnnnnnnnnnnnnnnnnnnnnnnnnnnnnnnnnnnnnnnnnnnnnnnnnnnnnnnnnnnnnnnnnnnnnnnnnnnnnnnnnnnnnnnnnnnnnnnnnnnnnnnnnnnnnnnnnnnnnnnnnnnnnnnnnnnnnnnnnnnnnnnnnnnnnnnnnnnnnnnnnnnnnnnnnnnnnnnnnnnnnnnnnnnnnnnnnnnnnnnnnnnnnnnnnnnnnnnnnnnnnnnnnnnnnnnnnnnnnnnnnnnnnnnnnnnnnnnnnnnnnnnnnnnnnnnnnnnnnnnnnnnnnnnnnnnnnnnnnnnnnnnnnnnnnnnnnnnnnnnnnnnnnnnnnnnnnnnnnnnnnnnnnnnnnnnnnnnnnnnnnnnnnnnnnnnnnnnnnnnnnnnnnnnnnnnnnnnnnnnnnnnnnnnnnnnnnnnnnnnnnnnnnnnnnnnnnnnnnnnnnnnnnnnnnnnnnnnnnnnnnnnnnnnnnnnnnnnnnnnnnnnnnnnnnnnnnnnnnnnnnnnnnnnnnnnnnnnnnnnnnnnnnnnnnnnnnnnnnnnnnnnnnnnnnnnnnnnnnnnnnnnnnnnnnnnnnnnnnnnnnnnnnnnnnnnnnnnnnnnnnnnnnnnnnnnnnnnnnnnnnnnnnnnnnnnnnnnnnnnnnnnnnnnnnnnnnnnnnnnnnnnnnnnnnnnnnnnnnnnnnnnnnnnnnnnnnnnnnnnnnnnnnnnnnnnnnnnnnnnnnnnnnnnnnnnnnnnnnnnnnnnnnnnnnnnnnnnnnnnnnnnnnnnnnnnnnnnnnnnnnnnnnnnnnnnnnnnnnnnnnnnnnnnnnnnnnnnnnnnnnnnnnnnnnnnnnnnnnnnnnnnnnnnnnnnnnnnnnnnnnnnnnnnnnnnnnnnnnnnnnnnnnnnnnnnnnnnnnnnnnnnnnnnnnnnnnnnnnnnnnnnnnnnnnnnnnnnnnnnnnnnnnnnnnnnnnnnnnnnnnnnnnnnnnnnnnnnnnnnnnnnnnnnnnnnnnnnnnnnnnnnnnnnnnnnnnnnnnnnnnnnnnnnnnnnnnnnnnnnnnnnnnnnnnnnnnnnnnnnnnnnnnnnnnnnnnnnnnnnnnnnnnnnnnnnnnnnnnnnnnnnnnnnnnnnnnnnnnnnnnnnnnnnnnnnnnnnnnnnnnnnnnnnnnnnnnnnnnnnnnnnnnnnnnnnnnnnnnnnnnnnnnnnnnnnnnnnnnnnnnnnnnnnnnnnnnnnnnnnnnnnnnnnnnnnnnnnnnnnnnnnnnnnnnnnnnnnnnnnnnnnnnnnnnnnnnnnnnnnnnnnnnnnnnnnnnnnnnnnnnnnnnnnnnnnnnnnnnnnnnnnnnnnnnnnnnnnnnnnnnnnnnnnnnnnnnnnnnnnnnnnnnnnnnnnnnnnnnnnnnnnnnnnnnnnnnnnnnnnnnnnnnnnnnnnnnnnnnnnnnnnnnnnnnnnnnnnnnnnnnnnnnnnnnnnnnnnnnnnnnnnnnnnnnnnnnnnnnnnnnnnnnnnnnnnnnnnnnnnnnnnnnnnnnnnnnnnnnnnnnnnnnnnnnnnnnnnnnnnnnnnnnnnnnnnnnnnnnnnnnnnnnnnnnnnnnnnnnnnnnnnnnnnnnnnnnnnnnnnnnnnnnnnnnnnnnnnnnnnnnnnnnnnnnnnnnnnnnnnnnnnnnnnnnnnnnnnnnnnnnnnnnnnnnnnnnnnnnnnnnnnnnnnnnnnnnnnnnnnnnnnnnnnnnnnnnnnnnnnnnnnnnnnnnnnnnnnnnnnnnnnnnnnnnnnnnnnnnnnnnnnnnnnnnnnnnnnnnnnnnnnnnnnnnnnnnnnnnnnnnnnnnnnnnnnnnnnnnnnnnnnnnnnnnnnnnnnnnnnnnnnnnnnnnnnnnnnnnnnnnnnnnnnnnnnnnnnnnnnnnnnnnnnnnnnnnnnnnnnnnnnnnnnnnnnnnnnnnnnnnnnnnnnnnnnnnnnnnnnnnnnnnnnnnnnnnnnnnnnnnnnnnnnnnnnnnnnnnnnnnnnnnnnnnnnnnnnnnnnnnnnnnnnnnnnnnnnnnnnnnnnnnnnnnnnnnnnnnnnnnnnnnnnnnnnnnnnnnnnnnnnnnnnnnnnnnnnnnnnnnnnnnnnnnnnnnnnnnnnnnnnnnnnnnnnnnnnnnnnnnnnnnnnnnnnnnnnnnnnnnnnnnnnnnnnnnnnnnnnnnnnnnnnnnnnnnnnnnnnnnnnnnnnnnnnnnnnnnnnnnnnnnnnnnnnnnnnnnnnnnnnnnnnnnnnnnnnnnnnnnnnnnnnnnnnnnnnnnnnnnnnnnnnnnnnnnnnnnnnnnnnnnnnnnnnnnnnnnnnnnnnnnnnnnnnnnnnnnnnnnnnnnnnnnnnnnnnnnnnnnnnnnnnnnnnnnnnnnnnnnnnnnnnnnnnnnnnnnnnnnnnnnnnnnnnnnnnnnnnnnnnnnnnnnnnnnnnnnnnnnnnnnnnnnnnnnnnnnnnnnnnnnnnnnnnnnnnnnnnnnnnnnnnnnnnnnnnnnnnnnnnnnnnnnnnnnnnnnnnnnnnnnnnnnnnnnnnnnnnnnnnnnnnnnnnnnnnnnnnnnnnnnnnnnnnnnnnnnnnnnnnnnnnnnnnnnnnnnnnnnnnnnnnnnnnnnnnnnnnnnnnnnnnnnnnnnnnnnnnnnnnnnnnnnnnnnnnnnnnnnnnnnnnnnnnnnnnnnnnnnnnnnnnnnnnnnnnnnnnnnnnnnnnnnnnnnnnnnnnnnnnnnnnnnnnnnnnnnnnnnnnnnnnnnnnnnnnnnnnnnnnnnnnnnnnnnnnnnnnnnnnnnnnnnnnnnnnnnnnnnnnnnnnnnnnnnnnnnnnnnnnnnnnnnnnnnnnnnnnnnnnnnnnnnnnnnnnnnnnnnnnnnnnnnnnnnnnnnnnnnnnnnnnnnnnnnnnnnnnnnnnnnnnnnnnnnnnnnnnnnnnnnnnnnnnnnnnnnnnnnnnnnnnnnnnnnnnnnnnnnnnnnnnnnnnnnnnnnnnnnnnnnnnnnnnnnnnnnnnnnnnnnnnnnnnnnnnnnnnnnnnnnnnnnnnnnnnnnnnnnnnnnnnnnnnnnnnnnnnnnnnnnnnnnnnnnnnnnnnnnnnnnnnnnnnnnnnnnnnnnnnnnnnnnnnnnnnnnnnnnnnnnnnnnnnnnnnnnnnnnnnnnnnnnnnnnnnnnnnnnnnnnnnnnnnnnnnnnnnnnnnnnnnnnnnnnnnnnnnnnnnnnnnnnnnnnnnnnnnnnnnnnnnnnnnnnnnnnnnnnnnnnnnnnnnnnnnnnnnnnnnnnnnnnnnnnnnnnnnnnnnnnnnnnnnnnnnnnnnnnnnnnnnnnnnnnnnnnnnnnnnnnnnnnnnnnnnnnnnnnnnnnnnnnnnnnnnnnnnnnnnnnnnnnnnnnnnnnnnnnnnnnnnnnnnnnnnnnnnnnnnnnnnnnnnnnnnnnnnnnnnnnnnnnnnnnnnnnnnnnnnnnnnnnnnnnnnnnnnnnnnnnnnnnnnnnnnnnnnnnnnnnnnnnnnnnnnnnnnnnnnnnnnnnnnnnnnnnnnnnnnnnnnnnnnnnnnnnnnnnnnnnnnnnnnnnnnnnnnnnnnnnnnnnnnnnnnnnnnnnnnnnnnnnnnnnnnnnnnnnnnnnnnnnnnnnnnnnnnnnnnnnnnnnnnnnnnnnnnnnnnnnnnnnnnnnnnnnnnnnnnnnnnnnnnnnnnnnnnnnnnnnnnnnnnnnnnnnnnnnnnnnnnnnnnnnnnnnnnnnnnnnnnnnnnnnnnnnnnnnnnnnnnnnnnnnnnnnnnnnnnnnnnnnnnnnnnnnnnnnnnnnnnnnnnnnnnnnnnnnnnnnnnnnnnnnnnnnnnnnnnnnnnnnnnnnnnnnnnnnnnnnnnnnnnnnnnnnnnnnnnnnnnnnnnnnnnnnnnnnnnnnnnnnnnnnnnnnnnnnnnnnnnnnnnnnnnnnnnnnnnnnnnnnnnnnnnnnnnnnnnnnnnnnnnnnnnnnnnnnnnnnnnnnnnnnnnnnnnnnnnnnnnnnnnnnnnnnnnnnnnnnnnnnnnnnnnnnnnnnnnnnnnnnnnnnnnnnnnnnnnnnnnnnnnnnnnnnnnnnnnnnnnnnnnnnnnnnnnnnnnnnnnnnnnnnnnnnnnnnnnnnnnnnnnnnnnnnnnnnnnnnnnnnnnnnnnnnnnnnnnnnnnnnnnnnnnnnnnnnnnnnnnnnnnnnnnnnnnnnnnnnnnnnnnnnnnnnnnnnnnnnnnnnnnnnnnnnnnnnnnnnnnnnnnnnnnnnnnnnnnnnnnnnnnnnnnnnnnnnnnnnnnnnnnnnnnnnnnnnnnnnnnnnnnnnnnnnnnnnnnnnnnnnnnnnnnnnnnnnnnnnnnnnnnnnnnnnnnnnnnnnnnnnnnnnnnnnnnnnnnnnnnnnnnnnnnnnnnnnnnnnnnnnnnnnnnnnnnnnnnnnnnnnnnnnnnnnnnnnnnnnnnnnnnnnnnnnnnnnnnnnnnnnnnnnnnnnnnnnnnnnnnnnnnnnnnnnnnnnnnnnnnnnnnnnnnnnnnnnnnnnnnnnnnnnnnnnnnnnnnnnnnnnnnnnnnnnnnnnnnnnnnnnnnnnnnnnnnnnnnnnnnnnnnnnnnnnnnnnnnnnnnnnnnnnnnnnnnnnnnnnnnnnnnnnnnnnnnnnnnnnnnnnnnnnnnnnnnnnnnnnnnnnnnnnnnnnnnnnnnnnnnnnnnnnnnnnnnnnnnnnnnnnnnnnnnnnnnnnnnnnnnnnnnnnnnnnnnnnnnnnnnnnnnnnnnnnnnnnnnnnnnnnnnnnnnnnnnnnnnnnnnnnnnnnnnnnnnnnnnnnnnnnnnnnnnnnnnnnnnnnnnnnnnnnnnnnnnnnnnnnnnnnnnnnnnnnnnnnnnnnnnnnnnnnnnnnnnnnnnnnnnnnnnnnnnnnnnnnnnnnnnnnnnnnnnnnnnnnnnnnnnnnnnnnnnnnnnnnnnnnnnnnnnnnnnnnnnnnnnnnnnnnnnnnnnnnnnnnnnnnnnnnnnnnnnnnnnnnnnnnnnnnnnnnnnnnnnnnnnnnnnnnnnnnnnnnnnnnnnnnnnnnnnnnnnnnnnnnnnnnnnnnnnnnnnnnnnnnnnnnnnnnnnnnnnnnnnnnnnnnnnnnnnnnnnnnnnnnnnnnnnnnnnnnnnnnnnnnnnnnnnnnnnnnnnnnnnnnnnnnnnnnnnnnnnnnnnnnnnnnnnnnnnnnnnnnnnnnnnnnnnnnnnnnnnnnnnnnnnnnnnnnnnnnnnnnnnnnnnnnnnnnnnnnnnnnnnnnnnnnnnnnnnnnnnnnnnnnnnnnnnnnnnnnnnnnnnnnnnnnnnnnnnnnnnnnnnnnnnnnnnnnnnnnnnnnnnnnnnnnnnnnnnnnnnnnnnnnnnnnnnnnnnnnnnnnnnnnnnnnnnnnnnnnnnnnnnnnnnnnnnnnnnnnnnnnnnnnnnnnnnnnnnnnnnnnnnnnnnnnnnnnnnnnnnnnnnnnnnnnnnnnnnnnnnnnnnnnnnnnnnnnnnnnnnnnnnnnnnnnnnnnnnnnnnnnnnnnnnnnnnnnnnnnnnnnnnnnnnnnnnnnnnnnnnnnnnnnnnnnnnnnnnnnnnnnnnnnnnnnnnnnnnnnnnnnnnnnnnnnnnnnnnnnnnnnnnnnnnnnnnnnnnnnnnnnnnnnnnnnnnnnnnnnnnnnnnnnnnnnnnnnnnnnnnnnnnnnnnnnnnnnnnnnnnnnnnnnnnnnnnnnnnnnnnnnnnnnnnnnnnnnnnnnnnnnnnnnnnnnnnnnnnnnnnnnnnnnnnnnnnnnnnnnnnnnnnnnnnnnnnnnnnnnnnnnnnnnnnnnnnnnnnnnnnnnnnnnnnnnnnnnnnnnnnnnnnnnnnnnnnnnnnnnnnnnnnnnnnnnnnnnnnnnnnnnnnnnnnnnnnnnnnnnnnnnnnnnnnnnnnnnnnnnnnnnnnnnnnnnnnnnnnnnnnnnnnnnnnnnnnnnnnnnnnnnnnnnnnnnnnnnnnnnnnnnnnnnnnnnnnnnnnnnnnnnnnnnnnnnnnnnnnnnnnnnnnnnnnnnnnnnnnnnnnnnnnnnnnnnnnnnnnnnnnnnnnnnnnnnnnnnnnnnnnnnnnnnnnnnnnnnnnnnnnnnnnnnnnnnnnnnnnnnnnnnnnnnnnnnnnnnnnnnnnnnnnnnnnnnnnnnnnnnnnnnnnnnnnnnnnnnnnnnnnnnnnnnnnnnnnnnnnnnnnnnnnnnnnnnnnnnnnnnnnnnnnnnnnnnnnnnnnnnnnnnnnnnnnnnnnnnnnnnnnnnnnnnnnnnnnnnnnnnnnnnnnnnnnnnnnnnnnnnnnnnnnnnnnnnnnnnnnnnnnnnnnnnnnnnnnnnnnnnnnnnnnnnnnnnnnnnnnnnnnnnnnnnnnnnnnnnnnnnnnnnnnnnnnnnnnnnnnnnnnnnnnnnnnnnnnnnnnnnnnnnnnnnnnnnnnnnnnnnnnnnnnnnnnnnnnnnnnnnnnnnnnnnnnnnnnnnnnnnnnnnnnnnnnnnnnnnnnnnnnnnnnnnnnnnnnnnnnnnnnnnnnnnnnnnnnnnnnnnnnnnnnnnnnnnnnnnnnnnnnnnnnnnnnnnnnnnnnnnnnnnnnnnnnnnnnnnnnnnnnnnnnnnnnnnnnnnnnnnnnnnnnnnnnnnnnnnnnnnnnnnnnnnnnnnnnnnnnnnnnnnnnnnnnnnnnnnnnnnnnnnnnnnnnnnnnnnnnnnnnnnnnnnnnnnnnnnnnnnnnnnnnnnnnnnnnnnnnnnnnnnnnnnnnnnnnnnnnnnnnnnnnnnnnnnnnnnnnnnnnnnnnnnnnnnnnnnnnnnnnnnnnnnnnnnnnnnnnnnnnnnnnnnnnnnnnnnnnnnnnnnnnnnnnnnnnnnnnnnnnnnnnnnnnnnnnnnnnnnnnnnnnnnnnnnnnnnnnnnnnnnnnnnnnnnnnnnnnnnnnnnnnnnnnnnnnnnnnnnnnnnnnnnnnnnnnnnnnnnnnnnnnnnnnnnnnnnnnnnnnnnnnnnnnnnnnnnnnnnnnnnnnnnnnnnnnnnnnnnnnnnnnnnnnnnnnnnnnnnnnnnnnnnnnnnnnnnnnnnnnnnnnnnnnnnnnnnnnnnnnnnnnnnnnnnnnnnnnnnnnnnnnnnnnnnnnnnnnnnnnnnnnnnnnnnnnnnnnnnnnnnnnnnnnnnnnnnnnnnnnnnnnnnnnnnnnnnnnnnnnnnnnnnnnnnnnnnnnnnnnnnnnnnnnnnnnnnnnnnnnnnnnnnnnnnnnnnnnnnnnnnnnnnnnnnnnnnnnnnnnnnnnnnnnnnnnnnnnnnnnnnnnnnnnnnnnnnnnnnnnnnnnnnnnnnnnnnnnnnnnnnnnnnnnnnnnnnnnnnnnnnnnnnnnnnnnnnnnnnnnnnnnnnnnnnnnnnnnnnnnnnnnnnnnnnnnnnnnnnnnnnnnnnnnnnnnnnnnnnnnnnnnnnnnnnnnnnnnnnnnnnnnnnnnnnnnnnnnnnnnnnnnnnnnnnnnnnnnnnnnnnnnnnnnnnnnnnnnnnnnnnnnnnnnnnnnnnnnnnnnnnnnnnnnnnnnnnnnnnnnnnnnnnnnnnnnnnnnnnnnnnnnnnnnnnnnnnnnnnnnnnnnnnnnnnnnnnnnnnnnnnnnnnnnnnnnnnnnnnnnnnnnnnnnnnnnnnnnnnnnnnnnnnnnnnnnnnnnnnnnnnnnnnnnnnnnnnnnnnnnnnnnnnnnnnnnnnnnnnnnnnnnnnnnnnnnnnnnnnnnnnnnnnnnnnnnnnnnnnnnnnnnnnnnnnnnnnnnnnnnnnnnnnnnnnnnnnnnnnnnnnnnnnnnnnnnnnnnnnnnnnnnnnnnnnnnnnnnnnnnnnnnnnnnnnnnnnnnnnnnnnnnnnnnnnnnnnnnnnnnnnnnnnnnnnnnnnnnnnnnnnnnnnnnnnnnnnnnnnnnnnnnnnnnnnnnnnnnnnnnnnnnnnnnnnnnnnnnnnnnnnnnnnnnnnnnnnnnnnnnnnnnnnnnnnnnnnnnnnnnnnnnnnnnnnnnnnnnnnnnnnnnnnnnnnnnnnnnnnnnnnnnnnnnnnnnnnnnnnnnnnnnnnnnnnnnnnnnnnnnnnnnnnnnnnnnnnnnnnnnnnnnnnnnnnnnnnnnnnnnnnnnnnnnnnnnnnnnnnnnnnnnnnnnnnnnnnnnnnnnnnnnnnnnnnnnnnnnnnnnnnnnnnnnnnnnnnnnnnnnnnnnnnnnnnnnnnnnnnnnnnnnnnnnnnnnnnnnnnnnnnnnnnnnnnnnnnnnnnnnnnnnnnnnnnnnnnnnnnnnnnnnnnnnnnnnnnnnnnnnnnnnnnnnnnnnnnnnnnnnnnnnnnnnnnnnnnnnnnnnnnnnnnnnnnnnnnnnnnnnnnnnnnnnnnnnnnnnnnnnnnnnnnnnnnnnnnnnnnnnnnnnnnnnnnnnnnnnnnnnnnnnnnnnnnnnnnnnnnnnnnnnnnnnnnnnnnnnnnnnnnnnnnnnnnnnnnnnnnnnnnnnnnnnnnnnnnnnnnnnnnnnnnnnnnnnnnnnnnnnnnnnnnnnnnnnnnnnnnnnnnnnnnnnnnnnnnnnnnnnnnnnnnnnnnnnnnnnnnnnnnnnnnnnnnnnnnnnnnnnnnnnnnnnnnnnnnnnnnnnnnnnnnnnnnnnnnnnnnnnnnnnnnnnnnnnnnnnnnnnnnnnnnnnnnnnnnnnnnnnnnnnnnnnnnnnnnnnnnnnnnnnnnnnnnnnnnnnnnnnnnnnnnnnnnnnnnnnnnnnnnnnnnnnnnnnnnnnnnnnnnnnnnnnnnnnnnnnnnnnnnnnnnnnnnnnnnnnnnnnnnnnnnnnnnnnnnnnnnnnnnnnnnnnnnnnnnnnnnnnnnnnnnnnnnnnnnnnnnnnnnnnnnnnnnnnnnnnnnnnnnnnnnnnnnnnnnnnnnnnnnnnnnnnnnnnnnnnnnnnnnnnnnnnnnnnnnnnnnnnnnnnnnnnnnnnnnnnnnnnnnnnnnnnnnnnnnnnnnnnnnnnnnnnnnnnnnnnnnnnnnnnnnnnnnnnnnnnnnnnnnnnnnnnnnnnnnnnnnnnnnnnnnnnnnnnnnnnnnnnnnnnnnnnnnnnnnnnnnnnnnnnnnnnnnnnnnnnnnnnnnnnnnnnnnnnnnnnnnnnnnnnnnnnnnnnnnnnnnnnnnnnnnnnnnnnnnnnnnnnnnnnnnnnnnnnnnnnnnnnnnnnnnnnnnnnnnnnnnnnnnnnnnnnnnnnnnnnnnnnnnnnnnnnnnnnnnnnnnnnnnnnnnnnnnnnnnnnnnnnnnnnnnnnnnnnnnnnnnnnnnnnnnnnnnnnnnnnnnnnnnnnnnnnnnnnnnnnnnnnnnnnnnnnnnnnnnnnnnnnnnnnnnnnnnnnnnnnnnnnnnnnnnnnnnnnnnnnnnnnnnnnnnnnnnnnnnnnnnnnnnnnnnnnnnnnnnnnnnnnnnnnnnnnnnnnnnnnnnnnnnnnnnnnnnnnnnnnnnnnnnnnnnnnnnnnnnnnnnnnnnnnnnnnnnnnnnnnnnnnnnnnnnnnnnnnnnnnnnnnnnnnnnnnnnnnnnnnnnnnnnnnnnnnnnnnnnnnnnnnnnnnnnnnnnnnnnnnnnnnnnnnnnnnnnnnnnnnnnnnnnnnnnnnnnnnnnnnnnnnnnnnnnnnnnnnnnnnnnnnnnnnnnnnnnnnnnnnnnnnnnnnnnnnnnnnnnnnnnnnnnnnnnnnnnnnnnnnnnnnnnnnnnnnnnnnnnnnnnnnnnnnnnnnnnnnnnnnnnnnnnnnnnnnnnnnnnnnnnnnnnnnnnnnnnnnnnnnnnnnnnnnnnnnnnnnnnnnnnnnnnnnnnnnnnnnnnnnnnnnnnnnnnnnnnnnnnnnnnnnnnnnnnnnnnnnnnnnnnnnnnnnnnnnnnnnnnnnnnnnnnnnnnnnnnnnnnnnnnnnnnnnnnnnnnnnnnnnnnnnnnnnnnnnnnnnnnnnnnnnnnnnnnnnnnnnnnnnnnnnnnnnnnnnnnnnnnnnnnnnnnnnnnnnnnnnnnnnnnnnnnnnnnnnnnnnnnnnnnnnnnnnnnnnnnnnnnnnnnnnnnnnnnnnnnnnnnnnnnnnnnnnnnnnnnnnnnnnnnnnnnnnnnnnnnnnnnnnnnnnnnnnnnnnnnnnnnnnnnnnnnnnnnnnnnnnnnnnnnnnnnnnnnnnnnnnnnnnnnnnnnnnnnnnnnnnnnnnnnnnnnnnnnnnnnnnnnnnnnnnnnnnnnnnnnnnnnnnnnnnnnnnnnnnnnnnnnnnnnnnnnnnnnnnnnnnnnnnnnnnnnnnnnnnnnnnnnnnnnnnnnnnnnnnnnnnnnnnnnnnnnnnnnnnnnnnnnnnnnnnnnnnnnnnnnnnnnnnnnnnnnnnnnnnnnnnnnnnnnnnnnnnnnnnnnnnnnnnnnnnnnnnnnnnnnnnnnnnnnnnnnnnnnnnnnnnnnnnnnnnnnnnnnnnnnnnnnnnnnnnnnnnnnnnnnnnnnnnnnnnnnnnnnnnnnnnnnnnnnnnnnnnnnnnnnnnnnnnnnnnnnnnnnnnnnnnnnnnnnnnnnnnnnnnnnnnnnnnnnnnnnnnnnnnnnnnnnnnnnnnnnnnnnnnnnnnnnnnnnnnnnnnnnnnnnnnnnnnnnnnnnnnnnnnnnnnnnnnnnnnnnnnnnnnnnnnnnnnnnnnnnnnnnnnnnnnnnnnnnnnnnnnnnnnnnnnnnnnnnnnnnnnnnnnnnnnnnnnnnnnnnnnnnnnnnnnnnnnnnnnnnnnnnnnnnnnnnnnnnnnnnnnnnnnnnnnnnnnnnnnnnnnnnnnnnnnnnnnnnnnnnnnnnnnnnnnnnnnnnnnnnnnnnnnnnnnnnnnnnnnnnnnnnnnnnnnnnnnnnnnnnnnnnnnnnnnnnnnnnnnnnnnnnnnnnnnnnnnnnnnnnnnnnnnnnnnnnnnnnnnnnnnnnnnnnnnnnnnnnnnnnnnnnnnnnnnnnnnnnnnnnnnnnnnnnnnnnnnnnnnnnnnnnnnnnnnnnnnnnnnnnnnnnnnnnnnnnnnnnnnnnnnnnnnnnnnnnnnnnnnnnnnnnnnnnnnnnnnnnnnnnnnnnnnnnnnnnnnnnnnnnnnnnnnnnnnnnnnnnnnnnnnnnnnnnnnnnnnnnnnnnnnnnnnnnnnnnnnnnnnnnnnnnnnnnnnnnnnnnnnnnnnnnnnnnnnnnnnnnnnnnnnnnnnnnnnnnnnnnnnnnnnnnnnnnnnnnnnnnnnnnnnnnnnnnnnnnnnnnnnnnnnnnnnnnnnnnnnnnnnnnnnnnnnnnnnnnnnnnnnnnnnnnnnnnnnnnnnnnnnnnnnnnnnnnnnnnnnnnnnnnnnnnnnnnnnnnnnnnnnnnnnnnnnnnnnnnnnnnnnnnnnnnnnnnnnnnnnnnnnnnnnnnnnnnnnnnnnnnnnnnnnnnnnnnnnnnnnnnnnnnnnnnnnnnnnnnnnnnnnnnnnnnnnnnnnnnnnnnnnnnnnnnnnnnnnnnnnnnnnnnnnnnnnnnnnnnnnnnnnnnnnnnnnnnnnnnnnnnnnnnnnnnnnnnnnnnnnnnnnnnnnnnnnnnnnnnnnnnnnnnnnnnnnnnnnnnnnnnnnnnnnnnnnnnnnnnnnnnnnnnnnnnnnnnnnnnnnnnnnnnnnnnnnnnnnnnnnnnnnnnnnnnnnnnnnnnnnnnnnnnnnnnnnnnnnnnnnnnnnnnnnnnnnnnnnnnnnnnnnnnnnnnnnnnnnnnnnnnnnnnnnnnnnnnnnnnnnnnnnnnnnnnnnnnnnnnnnnnnnnnnnnnnnnnnnnnnnnnnnnnnnnnnnnnnnnnnnnnnnnnnnnnnnnnnnnnnnnnnnnnnnnnnnnnnnnnnnnnnnnnnnnnnnnnnnnnnnnnnnnnnnnnnnnnnnnnnnnnnnnnnnnnnnnnnnnnnnnnnnnnnnnnnnnnnnnnnnnnnnnnnnnnnnnnnnnnnnnnnnnnnnnnnnnnnnnnnnnnnnnnnnnnnnnnnnnnnnnnnnnnnnnnnnnnnnnnnnnnnnnnnnnnnnnnnnnnnnnnnnnnnnnnnnnnnnnnnnnnnnnnnnnnnnnnnnnnnnnnnnnnnnnnnnnnnnnnnnnnnnnnnnnnnnnnnnnnnnnnnnnnnnnnnnnnnnnnnnnnnnnnnnnnnnnnnnnnnnnnnnnnnnnnnnnnnnnnnnnnnnnnnnnnnnnnnnnnnnnnnnnnnnnnnnnnnnnnnnnnnnnnnnnnnnnnnnnnnnnnnnnnnnnnnnnnnnnnnnnnnnnnnnnnnnnnnnnnnnnnnnnnnnnnnnnnnnnnnnnnnnnnnnnnnnnnnnnnnnnnnnnnnnnnnnnnnnnnnnnnnnnnnnnnnnnnnnnnnnnnnnnnnnnnnnnnnnnnnnnnnnnnnnnnnnnnnnnnnnnnnnnnnnnnnnnnnnnnnnnnnnnnnnnnnnnnnnnnnnnnnnnnnnnnnnnnnnnnnnnnnnnnnnnnnnnnnnnnnnnnnnnnnnnnnnnnnnnnnnnnnnnnnnnnnnnnnnnnnnnnnnnnnnnnnnnnnnnnnnnnnnnnnnnnnnnnnnnnnnnnnnnnnnnnnnnnnnnnnnnnnnnnnnnnnnnnnnnnnnnnnnnnnnnnnnnnnnnnnnnnnnnnnnnnnnnnnnnnnnnnnnnnnnnnnnnnnnnnnnnnnnnnnnnnnnnnnnnnnnnnnnnnnnnnnnnnnnnnnnnnnnnnnnnnnnnnnnnnnnnnnnnnnnnnnnnnnnnnnnnnnnnnnnnnnnnnnnnnnnnnnnnnnnnnnnnnnnnnnnnnnnnnnnnnnnnnnnnnnnnnnnnnnnnnnnnnnnnnnnnnnnnnnnnnnnnnnnnnnnnnnnnnnnnnnnnnnnnnnnnnnnnnnnnnnnnnnnnnnnnnnnnnnnnnnnnnnnnnnnnnnnnnnnnnnnnnnnnnnnnnnnnnnnnnnnnnnnnnnnnnnnnnnnnnnnnnnnnnnnnnnnnnnnnnnnnnnnnnnnnnnnnnnnnnnnnnnnnnnnnnnnnnnnnnnnnnnnnnnnnnnnnnnnnnnnnnnnnnnnnnnnnnnnnnnnnnnnnnnnnnnnnnnnnnnnnnnnnnnnnnnnnnnnnnnnnnnnnnnnnnnnnnnnnnnnnnnnnnnnnnnnnnnnnnnnnnnnnnnnnnnnnnnnnnnnnnnnnnnnnnnnnnnnnnnnnnnnnnnnnnnnnnnnnnnnnnnnnnnnnnnnnnnnnnnnnnnnnnnnnnnnnnnnnnnnnnnnnnnnnnnnnnnnnnnnnnnnnnnnnnnnnnnnnnnnnnnnnnnnnnnnnnnnnnnnnnnnnnnnnnnnnnnnnnnnnnnnnnnnnnnnnnnnnnnnnnnnnnnnnnnnnnnnnnnnnnnnnnnnnnnnnnnnnnnnnnnnnnnnnnnnnnnnnnnnnnnnnnnnnnnnnnnnnnnnnnnnnnnnnnnnnnnnnnnnnnnnnnnnnnnnnnnnnnnnnnnnnnnnnnnnnnnnnnnnnnnnnnnnnnnnnnnnnnnnnnnnnnnnnnnnnnnnnnnnnnnnnnnnnnnnnnnnnnnnnnnnnnnnnnnnnnnnnnnnnnnnnnnnnnnnnnnnnnnnnnnnnnnnnnnnnnnnnnnnnnnnnnnnnnnnnnnnnnnnnnnnnnnnnnnnnnnnnnnnnnnnnnnnnnnnnnnnnnnnnnnnnnnnnnnnnnnnnnnnnnnnnnnnnnnnnnnnnnnnnnnnnnnnnnnnnnnnnnnnnnnnnnnnnnnnnnnnnnnnnnnnnnnnnnnnnnnnnnnnnnnnnnnnnnnnnnnnnnnnnnnnnnnnnnnnnnnnnnnnnnnnnnnnnnnnnnnnnnnnnnnnnnnnnnnnnnnnnnnnnnnnnnnnnnnnnnnnnnnnnnnnnnnnnnnnnnnnnnnnnnnnnnnnnnnnnnnnnnnnnnnnnnnnnnnnnnnnnnnnnnnnnnnnnnnnnnnnnnnnnnnnnnnnnnnnnnnnnnnnnnnnnnnnnnnnnnnnnnnnnnnnnnnnnnnnnnnnnnnnnnnnnnnnnnnnnnnnnnnnnnnnnnnnnnnnnnnnnnnnnnnnnnnnnnnnnnnnnnnnnnnnnnnnnnnnnnnnnnnnnnnnnnnnnnnnnnnnnnnnnnnnnnnnnnnnnnnnnnnnnnnnnnnnnnnnnnnnnnnnnnnnnnnnnnnnnnnnnnnnnnnnnnnnnnnnnnnnnnnnnnnnnnnnnnnnnnnnnnnnnnnnnnnnnnnnnnnnnnnnnnnnnnnnnnnnnnnnnnnnnnnnnnnnnnnnnnnnnnnnnnnnnnnnnnnnnnnnnnnnnnnnnnnnnnnnnnnnnnnnnnnnnnnnnnnnnnnnnnnnnnnnnnnnnnnnnnnnnnnnnnnnnnnnnnnnnnnnnnnnnnnnnnnnnnnnnnnnnnnnnnnnnnnnnnnnnnnnnnnnnnnnnnnnnnnnnnnnnnnnnnnnnnnnnnnnnnnnnnnnnnnnnnnnnnnnnnnnnnnnnnnnnnnnnnnnnnnnnnnnnnnnnnnnnnnnnnnnnnnnnnnnnnnnnnnnnnnnnnnnnnnnnnnnnnnnnnnnnnnnnnnnnnnnnnnnnnnnnnnnnnnnnnnnnnnnnnnnnnnnnnnnnnnnnnnnnnnnnnnnnnnnnnnnnnnnnnnnnnnnnnnnnnnnnnnnnnnnnnnnnnnnnnnnnnnnnnnnnnnnnnnnnnnnnnnnnnnnnnnnnnnnnnnnnnnnnnnnnnnnnnnnnnnnnnnnnnnnnnnnnnnnnnnnnnnnnnnnnnnnnnnnnnnnnnnnnnnnnnnnnnnnnnnnnnnnnnnnnnnnnnnnnnnnnnnnnnnnnnnnnnnnnnnnnnnnnnnnnnnnnnnnnnnnnnnnnnnnnnnnnnnnnnnnnnnnnnnnnnnnnnnnnnnnnnnnnnnnnnnnnnnnnnnnnnnnnnnnnnnnnnnnnnnnnnnnnnnnnnnnnnnnnnnnnnnnnnnnnnnnnnnnnnnnnnnnnnnnnnnnnnnnnnnnnnnnnnnnnnnnnnnnnnnnnnnnnnnnnnnnnnnnnnnnnnnnnnnnnnnnnnnnnnnnnnnnnnnnnnnnnnnnnnnnnnnnnnnnnnnnnnnnnnnnnnnnnnnnnnnnnnnnnnnnnnnnnnnnnnnnnnnnnnnnnnnnnnnnnnnnnnnnnnnnnnnnnnnnnnnnnnnnnnnnnnnnnnnnnnnnnnnnnnnnnnnnnnnnnnnnnnnnnnnnnnnnnnnnnnnnnnnnnnnnnnnnnnnnnnnnnnnnnnnnnnnnnnnnnnnnnnnnnnnnnnnnnnnnnnnnnnnnnnnnnnnnnnnnnnnnnnnnnnnnnnnnnnnnnnnnnnnnnnnnnnnnnnnnnnnnnnnnnnnnnnnnnnnnnnnnnnnnnnnnnnnnnnnnnnnnnnnnnnnnnnnnnnnnnnnnnnnnnnnnnnnnnnnnnnnnnnnnnnnnnnnnnnnnnnnnnnnnnnnnnnnnnnnnnnnnnnnnnnnnnnnnnnnnnnnnnnnnnnnnnnnnnnnnnnnnnnnnnnnnnnnnnnnnnnnnnnnnnnnnnnnnnnnnnnnnnnnnnnnnnnnnnnnnnnnnnnnnnnnnnnnnnnnnnnnnnnnnnnnnnnnnnnnnnnnnnnnnnnnnnnnnnnnnnnnnnnnnnnnnnnnnnnnnnnnnnnnnnnnnnnnnnnnnnnnnnnnnnnnnnnnnnnnnnnnnnnnnnnnnnnnnnnnnnnnnnnnnnnnnnnnnnnnnnnnnnnnnnnnnnnnnnnnnnnnnnnnnnnnnnnnnnnnnnnnnnnnnnnnnnnnnnnnnnnnnnnnnnnnnnnnnnnnnnnnnnnnnnnnnnnnnnnnnnnnnnnnnnnnnnnnnnnnnnnnnnnnnnnnnnnnnnnnnnnnnnnnnnnnnnnnnnnnnnnnnnnnnnnnnnnnnnnnnnnnnnnnnnnnnnnnnnnnnnnnnnnnnnnnnnnnnnnnnnnnnnnnnnnnnnnnnnnnnnnnnnnnnnnnnnnnnnnnnnnnnnnnnnnnnnnnnnnnnnnnnnnnnnnnnnnnnnnnnnnnnnnnnnnnnnnnnnnnnnnnnnnnnnnnnnnnnnnnnnnnnnnnnnnnnnnnnnnnnnnnnnnnnnnnnnnnnnnnnnnnnnnnnnnnnnnnnnnnnnnnnnnnnnnnnnnnnnnnnnnnnnnnnnnnnnnnnnnnnnnnnnnnnnnnnnnnnnnnnnnnnnnnnnnnnnnnnnnnnnnnnnnnnnnnnnnnnnnnnnnnnnnnnnnnnnnnnnnnnnnnnnnnnnnnnnnnnnnnnnnnnnnnnnnnnnnnnnnnnnnnnnnnnnnnnnnnnnnnnnnnnnnnnnnnnnnnnnnnnnnnnnnnnnnnnnnnnnnnnnnnnnnnnnnnnnnnnnnnnnnnnnnnnnnnnnnnnnnnnnnnnnnnnnnnnnnnnnnnnnnnnnnnnnnnnnnnnnnnnnnnnnnnnnnnnnnnnnnnnnnnnnnnnnnnnnnnnnnnnnnnnnnnnnnnnnnnnnnnnnnnnnnnnnnnnnnnnnnnnnnnnnnnnnnnnnnnnnnnnnnnnnnnnnnnnnnnnnnnnnnnnnnnnnnnnnnnnnnnnnnnnnnnnnnnnnnnnnnnnnnnnnnnnnnnnnnnnnnnnnnnnnnnnnnnnnnnnnnnnnnnnnnnnnnnnnnnnnnnnnnnnnnnnnnnnnnnnnnnnnnnnnnnnnnnnnnnnnnnnnnnnnnnnnnnnnnnnnnnnnnnnnnnnnnnnnnnnnnnnnnnnnnnnnnnnnnnnnnnnnnnnnnnnnnnnnnnnnnnnnnnnnnnnnnnnnnnnnnnnnnnnnnnnnnnnnnnnnnnnnnnnnnnnnnnnnnnnnnnnnnnnnnnnnnnnnnnnnnnnnnnnnnnnnnnnnnnnnnnnnnnnnnnnnnnnnnnnnnnnnnnnnnnnnnnnnnnnnnnnnnnnnnnnnnnnnnnnnnnnnnnnnnnnnnnnnnnnnnnnnnnnnnnnnnnnnnnnnnnnnnnnnnnnnnnnnnnnnnnnnnnnnnnnnnnnnnnnnnnnnnnnnnnnnnnnnnnnnnnnnnnnnnnnnnnnnnnnnnnnnnnnnnnnnnnnnnnnnnnnnnnnnnnnnnnnnnnnnnnnnnnnnnnnnnnnnnnnnnnnnnnnnnnnnnnnnnnnnnnnnnnnnnnnnnnnnnnnnnnnnnnnnnnnnnnnnnnnnnnnnnnnnnnnnnnnnnnnnnnnnnnnnnnnnnnnnnnnnnnnnnnnnnnnnnnnnnnnnnnnnnnnnnnnnnnnnnnnnnnnnnnnnnnnnnnnnnnnnnnnnnnnnnnnnnnnnnnnnnnnnnnnnnnnnnnnnnnnnnnnnnnnnnnnnnnnnnnnnnnnnnnnnnnnnnnnnnnnnnnnnnnnnnnnnnnnnnnnnnnnnnnnnnnnnnnnnnnnnnnnnnnnnnnnnnnnnnnnnnnnnnnnnnnnnnnnnnnnnnnnnnnnnnnnnnnnnnnnnnnnnnnnnnnnnnnnnnnnnnnnnnnnnnnnnnnnnnnnnnnnnnnnnnnnnnnnnnnnnnnnnnnnnnnnnnnnnnnnnnnnnnnnnnnnnnnnnnnnnnnnnnnnnnnnnnnnnnnnnnnnnnnnnnnnnnnnnnnnnnnnnnnnnnnnnnnnnnnnnnnnnnnnnnnnnnnnnnnnnnnnnnnnnnnnnnnnnnnnnnnnnnnnnnnnnnnnnnnnnnnnnnnnnnnnnnnnnnnnnnnnnnnnnnnnnnnnnnnnnnnnnnnnnnnnnnnnnnnnnnnnnnnnnnnnnnnnnnnnnnnnnnnnnnnnnnnnnnnnnnnnnnnnnnnnnnnnnnnnnnnnnnnnnnnnnnnnnnnnnnnnnnnnnnnnnnnnnnnnnnnnnnnnnnnnnnnnnnnnnnnnnnnnnnnnnnnnnnnnnnnnnnnnnnnnnnnnnnnnnnnnnnnnnnnnnnnnnnnnnnnnnnnnnnnnnnnnnnnnnnnnnnnnnnnnnnnnnnnnnnnnnnnnnnnnnnnnnnnnnnnnnnnnnnnnnnnnnnnnnnnnnnnnnnnnnnnnnnnnnnnnnnnnnnnnnnnnnnnnnnnnnnnnnnnnnnnnnnnnnnnnnnnnnnnnnnnnnnnnnnnnnnnnnnnnnnnnnnnnnnnnnnnnnnnnnnnnnnnnnnnnnnnnnnnnnnnnnnnnnnnnnnnnnnnnnnnnnnnnnnnnnnnnnnnnnnnnnnnnnnnnnnnnnnnnnnnnnnnnnnnnnnnnnnnnnnnnnnnnnnnnnnnnnnnnnnnnnnnnnnnnnnnnnnnnnnnnnnnnnnnnnnnnnnnnnnnnnnnnnnnnnnnnnnnnnnnnnnnnnnnnnnnnnnnnnnnnnnnnnnnnnnnnnnnnnnnnnnnnnnnnnnnnnnnnnnnnnnnnnnnnnnnnnnnnnnnnnnnnnnnnnnnnnnnnnnnnnnnnnnnnnnnnnnnnnnnnnnnnnnnnnnnnnnnnnnnnnnnnnnnnnnnnnnnnnnnnnnnnnnnnnnnnnnnnnnnnnnnnnnnnnnnnnnnnnnnnnnnnnnnnnnnnnnnnnnnnnnnnnnnnnnnnnnnnnnnnnnnnnnnnnnnnnnnnnnnnnnnnnnnnnnnnnnnnnnnnnnnnnnnnnnnnnnnnnnnnnnnnnnnnnnnnnnnnnnnnnnnnnnnnnnnnnnnnnnnnnnnnnnnnnnnnnnnnnnnnnnnnnnnnnnnnnnnnnnnnnnnnnnnnnnnnnnnnnnnnnnnnnnnnnnnnnnnnnnnnnnnnnnnnnnnnnnnnnnnnnnnnnnnnnnnnnnnnnnnnnnnnnnnnnnnnnnnnnnnnnnnnnnnnnnnnnnnnnnnnnnnnnnnnnnnnnnnnnnnnnnnnnnnnnnnnnnnnnnnnnnnnnnnnnnnnnnnnnnnnnnnnnnnnnnnnnnnnnnnnnnnnnnnnnnnnnnnnnnnnnnnnnnnnnnnnnnnnnnnnnnnnnnnnnnnnnnnnnnnnnnnnnnnnnnnnnnnnnnnnnnnnnnnnnnnnnnnnnnnnnnnnnnnnnnnnnnnnnnnnnnnnnnnnnnnnnnnnnnnnnnnnnnnnnnnnnnnnnnnnnnnnnnnnnnnnnnnnnnnnnnnnnnnnnnnnnnnnnnnnnnnnnnnnnnnnnnnnnnnnnnnnnnnnnnnnnnnnnnnnnnnnnnnnnnnnnnnnnnnnnnnnnnnnnnnnnnnnnnnnnnnnnnnnnnnnnnnnnnnnnnnnnnnnnnnnnnnnnnnnnnnnnnnnnnnnnnnnnnnnnnnnnnnnnnnnnnnnnnnnnnnnnnnnnnnnnnnnnnnnnnnnnnnnnnnnnnnnnnnnnnnnnnnnnnnnnnnnnnnnnnnnnnnnnnnnnnnnnnnnnnnnnnnnnnnnnnnnnnnnnnnnnnnnnnnnnnnnnnnnnnnnnnnnnnnnnnnnnnnnnnnnnnnnnnnnnnnnnnnnnnnnnnnnnnnnnnnnnnnnnnnnnnnnnnnnnnnnnnnnnnnnnnnnnnnnnnnnnnnnnnnnnnnnnnnnnnnnnnnnnnnnnnnnnnnnnnnnnnnnnnnnnnnnnnnnnnnnnnnnnnnnnnnnnnnnnnnnnnnnnnnnnnnnnnnnnnnnnnnnnnnnnnnnnnnnnnnnnnnnnnnnnnnnnnnnnnnnnnnnnnnnnnnnnnnnnnnnnnnnnnnnnnnnnnnnnnnnnnnnnnnnnnnnnnnnnnnnnnnnnnnnnnnnnnnnnnnnnnnnnnnnnnnnnnnnnnnnnnnnnnnnnnnnnnnnnnnnnnnnnnnnnnnnnnnnnnnnnnnnnnnnnnnnnnnnnnnnnnnnnnnnnnnnnnnnnnnnnnnnnnnnnnnnnnnnnnnnnnnnnnnnnnnnnnnnnnnnnnnnnnnnnnnnnnnnnnnnnnnnnnnnnnnnnnnnnnnnnnnnnnnnnnnnnnnnnnnnnnnnnnnnnnnnnnnnnnnnnnnnnnnnnnnnnnnnnnnnnnnnnnnnnnnnnnnnnnnnnnnnnnnnnnnnnnnnnnnnnnnnnnnnnnnnnnnnnnnnnnnnnnnnnnnnnnnnnnnnnnnnnnnnnnnnnnnnnnnnnnnnnnnnnnnnnnnnnnnnnnnnnnnnnnnnnnnnnnnnnnnnnnnnnnnnnnnnnnnnnnnnnnnnnnnnnnnnnnnnnnnnnnnnnnnnnnnnnnnnnnnnnnnnnnnnnnnnnnnnnnnnnnnnnnnnnnnnnnnnnnnnnnnnnnnnnnnnnnnnnnnnnnnnnnnnnnnnnnnnnnnnnnnnnnnnnnnnnnnnnnnnnnnnnnnnnnnnnnnnnnnnnnnnnnnnnnnnnnnnnnnnnnnnnnnnnnnnnnnnnnnnnnnnnnnnnnnnnnnnnnnnnnnnnnnnnnnnnnnnnnnnnnnnnnnnnnnnnnnnnnnnnnnnnnnnnnnnnnnnnnnnnnnnnnnnnnnnnnnnnnnnnnnnnnnnnnnnnnnnnnnnnnnnnnnnnnnnnnnnnnnnnnnnnnnnnnnnnnnnnnnnnnnnnnnnnnnnnnnnnnnnnnnnnnnnnnnnnnnnnnnnnnnnnnnnnnnnnnnnnnnnnnnnnnnnnnnnnnnnnnnnnnnnnnnnnnnnnnnnnnnnnnnnnnnnnnnnnnnnnnnnnnnnnnnnnnnnnnnnnnnnnnnnnnnnnnnnnnnnnnnnnnnnnnnnnnnnnnnnnnnnnnnnnnnnnnnnnnnnnnnnnnnnnnnnnnnnnnnnnnnnnnnnnnnnnnnnnnnnnnnnnnnnnnnnnnnnnnnnnnnnnnnnnnnnnnnnnnnnnnnnnnnnnnnnnnnnnnnnnnnnnnnnnnnnnnnnnnnnnnnnnnnnnnnnnnnnnnnnnnnnnnnnnnnnnnnnnnnnnnnnnnnnnnnnnnnnnnnnnnnnnnnnnnnnnnnnnnnnnnnnnnnnnnnnnnnnnnnnnnnnnnnnnnnnnnnnnnnnnnnnnnnnnnnnnnnnnnnnnnnnnnnnnnnnnnnnnnnnnnnnnnnnnnnnnnnnnnnnnnnnnnnnnnnnnnnnnnnnnnnnnnnnnnnnnnnnnnnnnnnnnnnnnnnnnnnnnnnnnnnnnnnnnnnnnnnnnnnnnnnnnnnnnnnnnnnnnnnnnnnnnnnnnnnnnnnnnnnnnnnnnnnnnnnnnnnnnnnnnnnnnnnnnnnnnnnnnnnnnnnnnnnnnnnnnnnnnnnnnnnnnnnnnnnnnnnnnnnnnnnnnnnnnnnnnnnnnnnnnnnnnnnnnnnnnnnnnnnnnnnnnnnnnnnnnnnnnnnnnnnnnnnnnnnnnnnnnnnnnnnnnnnnnnnnnnnnnnnnnnnnnnnnnnnnnnnnnnnnnnnnnnnnnnnnnnnnnnnnnnnnnnnnnnnnnnnnnnnnnnnnnnnnnnnnnnnnnnnnnnnnnnnnnnnnnnnnnnnnnnnnnnnnnnnnnnnnnnnnnnnnnnnnnnnnnnnnnnnnnnnnnnnnnnnnnnnnnnnnnnnnnnnnnnnnnnnnnnnnnnnnnnnnnnnnnnnnnnnnnnnnnnnnnnnnnnnnnnnnnnnnnnnnnnnnnnnnnnnnnnnnnnnnnnnnnnnnnnnnnnnnnnnnnnnnnnnnnnnnnnnnnnnnnnnnnnnnnnnnnnnnnnnnnnnnnnnnnnnnnnnnnnnnnnnnnnnnnnnnnnnnnnnnnnnnnnnnnnnnnnnnnnnnnnnnnnnnnnnnnnnnnnnnnnnnnnnnnnnnnnnnnnnnnnnnnnnnnnnnnnnnnnnnnnnnnnnnnnnnnnnnnnnnnnnnnnnnnnnnnnnnnnnnnnnnnnnnnnnnnnnnnnnnnnnnnnnnnnnnnnnnnnnnnnnnnnnnnnnnnnnnnnnnnnnnnnnnnnnnnnnnnnnnnnnnnnnnnnnnnnnnnnnnnnnnnnnnnnnnnnnnnnnnnnnnnnnnnnnnnnnnnnnnnnnnnnnnnnnnnnnnnnnnnnnnnnnnnnnnnnnnnnnnnnnnnnnnnnnnnnnnnnnnnnnnnnnnnnnnnnnnnnnnnnnnnnnnnnnnnnnnnnnnnnnnnnnnnnnnnnnnnnnnnnnnnnnnnnnnnnnnnnnnnnnnnnnnnnnnnnnnnnnnnnnnnnnnnnnnnnnnnnnnnnnnnnnnnnnnnnnnnnnnnnnnnnnnnnnnnnnnnnnnnnnnnnnnnnnnnnnnnnnnnnnnnnnnnnnnnnnnnnnnnnnnnnnnnnnnnnnnnnnnnnnnnnnnnnnnnnnnnnnnnnnnnnnnnnnnnnnnnnnnnnnnnnnnnnnnnnnnnnnnnnnnnnnnnnnnnnnnnnnnnnnnnnnnnnnnnnnnnnnnnnnnnnnnnnnnnnnnnnnnnnnnnnnnnnnnnnnnnnnnnnnnnnnnnnnnnnnnnnnnnnnnnnnnnnnnnnnnnnnnnnnnnnnnnnnnnnnnnnnnnnnnnnnnnnnnnnnnnnnnnnnnnnnnnnnnnnnnnnnnnnnnnnnnnnnnnnnnnnnnnnnnnnnnnnnnnnnnnnnnnnnnnnnnnnnnnnnnnnnnnnnnnnnnnnnnnnnnnnnnnnnnnnnnnnnnnnnnnnnnnnnnnnnnnnnnnnnnnnnnnnnnnnnnnnnnnnnnnnnnnnnnnnnnnnnnnnnnnnnnnnnnnnnnnnnnnnnnnnnnnnnnnnnnnnnnnnnnnnnnnnnnnnnnnnnnnnnnnnnnnnnnnnnnnnnnnnnnnnnnnnnnnnnnnnnnnnnnnnnnnnnnnnnnnnnnnnnnnnnnnnnnnnnnnnnnnnnnnnnnnnnnnnnnnnnnnnnnnnnnnnnnnnnnnnnnnnnnnnnnnnnnnnnnnnnnnnnnnnnnnnnnnnnnnnnnnnnnnnnnnnnnnnnnnnnnnnnnnnnnnnnnnnnnnnnnnnnnnnnnnnnnnnnnnnnnnnnnnnnnnnnnnnnnnnnnnnnnnnnnnnnnnnnnnnnnnnnnnnnnnnnnnnnnnnnnnnnnnnnnnnnnnnnnnnnnnnnnnnnnnnnnnnnnnnnnnnnnnnnnnnnnnnnnnnnnnnnnnnnnnnnnnnnnnnnnnnnnnnnnnnnnnnnnnnnnnnnnnnnnnnnnnnnnnnnnnnnnnnnnnnnnnnnnnnnnnnnnnnnnnnnnnnnnnnnnnnnnnnnnnnnnnnnnnnnnnnnnnnnnnnnnnnnnnnnnnnnnnnnnnnnnnnnnnnnnnnnnnnnnnnnnnnnnnnnnnnnnnnnnnnnnnnnnnnnnnnnnnnnnnnnnnnnnnnnnnnnnnnnnnnnnnnnnnnnnnnnnnnnnnnnnnnnnnnnnnnnnnnnnnnnnnnnnnnnnnnnnnnnnnnnnnnnnnnnnnnnnnnnnnnnnnnnnnnnnnnnnnnnnnnnnnnnnnnnnnnnnnnnnnnnnnnnnnnnnnnnnnnnnnnnnnnnnnnnnnnnnnnnnnnnnnnnnnnnnnnnnnnnnnnnnnnnnnnnnnnnnnnnnnnnnnnnnnnnnnnnnnnnnnnnnnnnnnnnnnnnnnnnnnnnnnnnnnnnnnnnnnnnnnnnnnnnnnnnnnnnnnnnnnnnnnnnnnnnnnnnnnnnnnnnnnnnnnnnnnnnnnnnnnnnnnnnnnnnnnnnnnnnnnnnnnnnnnnnnnnnnnnnnnnnnnnnnnnnnnnnnnnnnnnnnnnnnnnnnnnnnnnnnnnnnnnnnnnnnnnnnnnnnnnnnnnnnnnnnnnnnnnnnnnnnnnnnnnnnnnnnnnnnnnnnnnnnnnnnnnnnnnnnnnnnnnnnnnnnnnnnnnnnnnnnnnnnnnnnnnnnnnnnnnnnnnnnnnnnnnnnnnnnnnnnnnnnnnnnnnnnnnnnnnnnnnnnnnnnnnnnnnnnnnnnnnnnnnnnnnnnnnnnnnnnnnnnnnnnnnnnnnnnnnnnnnnnnnnnnnnnnnnnnnnnnnnnnnnnnnnnnnnnnnnnnnnnnnnnnnnnnnnnnnnnnnnnnnnnnnnnnnnnnnnnnnnnnnnnnnnnnnnnnnnnnnnnnnnnnnnnnnnnnnnnnnnnnnnnnnnnnnnnnnnnnnnnnnnnnnnnnnnnnnnnnnnnnnnnnnnnnnnnnnnnnnnnnnnnnnnnnnnnnnnnnnnnnnnnnnnnnnnnnnnnnnnnnnnnnnnnnnnnnnnnnnnnnnnnnnnnnnnnnnnnnnnnnnnnnnnnnnnnnnnnnnnnnnnnnnnnnnnnnnnnnnnnnnnnnnnnnnnnnnnnnnnnnnnnnnnnnnnnnnnnnnnnnnnnnnnnnnnnnnnnnnnnnnnnnnnnnnnnnnnnnnnnnnnnnnnnnnnnnnnnnnnnnnnnnnnnnnnnnnnnnnnnnnnnnnnnnnnnnnnnnnnnnnnnnnnnnnnnnnnnnnnnnnnnnnnnnnnnnnnnnnnnnnnnnnnnnnnnnnnnnnnnnnnnnnnnnnnnnnnnnnnnnnnnnnnnnnnnnnnnnnnnnnnnnnnnnnnnnnnnnnnnnnnnnnnnnnnnnnnnnnnnnnnnnnnnnnnnnnnnnnnnnnnnnnnnnnnnnnnnnnnnnnnnnnnnnnnnnnnnnnnnnnnnnnnnnnnnnnnnnnnnnnnnnnnnnnnnnnnnnnnnnnnnnnnnnnnnnnnnnnnnnnnnnnnnnnnnnnnnnnnnnnnnnnnnnnnnnnnnnnnnnnnnnnnnnnnnnnnnnnnnnnnnnnnnnnnnnnnnnnnnnnnnnnnnnnnnnnnnnnnnnnnnnnnnnnnnnnnnnnnnnnnnnnnnnnnnnnnnnnnnnnnnnnnnnnnnnnnnnnnnnnnnnnnnnnnnnnnnnnnnnnnnnnnnnnnnnnnnnnnnnnnnnnnnnnnnnnnnnnnnnnnnnnnnnnnnnnnnnnnnnnnnnnnnnnnnnnnnnnnnnnnnnnnnnnnnnnnnnnnnnnnnnnnnnnnnnnnnnnnnnnnnnnnnnnnnnnnnnnnnnnnnnnnnnnnnnnnnnnnnnnnnnnnnnnnnnnnnnnnnnnnnnnnnnnnnnnnnnnnnnnnnnnnnnnnnnnnnnnnnnnnnnnnnnnnnnnnnnnnnnnnnnnnnnnnnnnnnnnnnnnnnnnnnnnnnnnnnnnnnnnnnnnnnnnnnnnnnnnnnnnnnnnnnnnnnnnnnnnnnnnnnnnnnnnnnnnnnnnnnnnnnnnnnnnnnnnnnnnnnnnnnnnnnnnnnnnnnnnnnnnnnnnnnnnnnnnnnnnnnnnnnnnnnnnnnnnnnnnnnnnnnnnnnnnnnnnnnnnnnnnnnnnnnnnnnnnnnnnnnnnnnnnnnnnnnnnnnnnnnnnnnnnnnnnnnnnnnnnnnnnnnnnnnnnnnnnnnnnnnnnnnnnnnnnnnnnnnnnnnnnnnnnnnnnnnnnnnnnnnnnnnnnnnnnnnnnnnnnnnnnnnnnnnnnnnnnnnnnnnnnnnnnnnnnnnnnnnnnnnnnnnnnnnnnnnnnnnnnnnnnnnnnnnnnnnnnnnnnnnnnnnnnnnnnnnnnnnnnnnnnnnnnnnnnnnnnnnnnnnnnnnnnnnnnnnnnnnnnnnnnnnnnnnnnnnnnnnnnnnnnnnnnnnnnnnnnnnnnnnnnnnnnnnnnnnnnnnnnnnnnnnnnnnnnnnnnnnnnnnnnnnnnnnnnnnnnnnnnnnnnnnnnnnnnnnnnnnnnnnnnnnnnnnnnnnnnnnnnnnnnnnnnnnnnnnnnnnnnnnnnnnnnnnnnnnnnnnnnnnnnnnnnnnnnnnnnnnnnnnnnnnnnnnnnnnnnnnnnnnnnnnnnnnnnnnnnnnnnnnnnnnnnnnnnnnnnnnnnnnnnnnnnnnnnnnnnnnnnnnnnnnnnnnnnnnnnnnnnnnnnnnnnnnnnnnnnnnnnnnnnnnnnnnnnnnnnnnnnnnnnnnnnnnnnnnnnnnnnnnnnnnnnnnnnnnnnnnnnnnnnnnnnnnnnnnnnnnnnnnnnnnnnnnnnnnnnnnnnnnnnnnnnnnnnnnnnnnnnnnnnnnnnnnnnnnnnnnnnnnnnnnnnnnnnnnnnnnnnnnnnnnnnnnnnnnnnnnnnnnnnnnnnnnnnnnnnnnnnnnnnnnnnnnnnnnnnnnnnnnnnnnnnnnnnnnnnnnnnnnnnnnnnnnnnnnnnnnnnnnnnnnnnnnnnnnnnnnnnnnnnnnnnnnnnnnnnnnnnnnnnnnnnnnnnnnnnnnnnnnnnnnnnnnnnnnnnnnnnnnnnnnnnnnnnnnnnnnnnnnnnnnnnnnnnnnnnnnnnnnnnnnnnnnnnnnnnnnnnnnnnnnnnnnnnnnnnnnnnnnnnnnnnnnnnnnnnnnnnnnnnnnnnnnnnnnnnnnnnnnnnnnnnnnnnnnnnnnnnnnnnnnnnnnnnnnnnnnnnnnnnnnnnnnnnnnnnnnnnnnnnnnnnnnnnnnnnnnnnnnnnnnnnnnnnnnnnnnnnnnnnnnnnnnnnnnnnnnnnnnnnnnnnnnnnnnnnnnnnnnnnnnnnnnnnnnnnnnnnnnnnnnnnnnnnnnnnnnnnnnnnnnnnnnnnnnnnnnnnnnnnnnnnnnnnnnnnnnnnnnnnnnnnnnnnnnnnnnnnnnnnnnnnnnnnnnnnnnnnnnnnnnnnnnnnnnnnnnnnnnnnnnnnnnnnnnnnnnnnnnnnnnnnnnnnnnnnnnnnnnnnnnnnnnnnnnnnnnnnnnnnnnnnnnnnnnnnnnnnnnnnnnnnnnnnnnnnnnnnnnnnnnnnnnnnnnnnnnnnnnnnnnnnnnnnnnnnnnnnnnnnnnnnnnnnnnnnnnnnnnnnnnnnnnnnnnnnnnnnnnnnnnnnnnnnnnnnnnnnnnnnnnnnnnnnnnnnnnnnnnnnnnnnnnnnnnnnnnnnnnnnnnnnnnnnnnnnnnnnnnnnnnnnnnnnnnnnnnnnnnnnnnnnnnnnnnnnnnnnnnnnnnnnnnnnnnnnnnnnnnnnnnnnnnnnnnnnnnnnnnnnnnnnnnnnnnnnnnnnnnnnnnnnnnnnnnnnnnnnnnnnnnnnnnnnnnnnnnnnnnnnnnnnnnnnnnnnnnnnnnnnnnnnnnnnnnnnnnnnnnnnnnnnnnnnnnnnnnnnnnnnnnnnnnnnnnnnnnnnnnnnnnnnnnnnnnnnnnnnnnnnnnnnnnnnnnnnnnnnnnnnnnnnnnnnnnnnnnnnnnnnnnnnnnnnnnnnnnnnnnnnnnnnnnnnnnnnnnnnnnnnnnnnnnnnnnnnnnnnnnnnnnnnnnnnnnnnnnnnnnnnnnnnnnnnnnnnnnnnnnnnnnnnnnnnnnnnnnnnnnnnnnnnnnnnnnnnnnnnnnnnnnnnnnnnnnnnnnnnnnnnnnnnnnnnnnnnnnnnnnnnnnnnnnnnnnnnnnnnnnnnnnnnnnnnnnnnnnnnnnnnnnnnnnnnnnnnnnnnnnnnnnnnnnnnnnnnnnnnnnnnnnnnnnnnnnnnnnnnnnnnnnnnnnnnnnnnnnnnnnnnnnnnnnnnnnnnnnnnnnnnnnnnnnnnnnnnnnnnnnnnnnnnnnnnnnnnnnnnnnnnnnnnnnnnnnnnnnnnnnnnnnnnnnnnnnnnnnnnnnnnnnnnnnnnnnnnnnnnnnnnnnnnnnnnnnnnnnnnnnnnnnnnnnnnnnnnnnnnnnnnnnnnnnnnnnnnnnnnnnnnnnnnnnnnnnnnnnnnnnnnnnnnnnnnnnnnnnnnnnnnnnnnnnnnnnnnnnnnnnnnnnnnnnnnnnnnnnnnnnnnnnnnnnnnnnnnnnnnnnnnnnnnnnnnnnnnnnnnnnnnnnnnnnnnnnnnnnnnnnnnnnnnnnnnnnnnnnnnnnnnnnnnnnnnnnnnnnnnnnnnnnnnnnnnnnnnnnnnnnnnnnnnnnnnnnnnnnnnnnnnnnnnnnnnnnnnnnnnnnnnnnnnnnnnnnnnnnnnnnnnnnnnnnnnnnnnnnnnnnnnnnnnnnnnnnnnnnnnnnnnnnnnnnnnnnnnnnnnnnnnnnnnnnnnnnnnnnnnnnnnnnnnnnnnnnnnnnnnnnnnnnnnnnnnnnnnnnnnnnnnnnnnnnnnnnnnnnnnnnnnnnnnnnnnnnnnnnnnnnnnnnnnnnnnnnnnnnnnnnnnnnnnnnnnnnnnnnnnnnnnnnnnnnnnnnnnnnnnnnnnnnnnnnnnnnnnnnnnnnnnnnnnnnnnnnnnnnnnnnnnnnnnnnnnnnnnnnnnnnnnnnnnnnnnnnnnnnnnnnnnnnnnnnnnnnnnnnnnnnnnnnnnnnnnnnnnnnnnnnnnnnnnnnnnnnnnnnnnnnnnnnnnnnnnnnnnnnnnnnnnnnnnnnnnnnnnnnnnnnnnnnnnnnnnnnnnnnnnnnnnnnnnnnnnnnnnnnnnnnnnnnnnnnnnnnnnnnnnnnnnnnnnnnnnnnnnnnnnnnnnnnnnnnnnnnnnnnnnnnnnnnnnnnnnnnnnnnnnnnnnnnnnnnnnnnnnnnnnnnnnnnnnnnnnnnnnnnnnnnnnnnnnnnnnnnnnnnnnnnnnnnnnnnnnnnnnnnnnnnnnnnnnnnnnnnnnnnnnnnnnnnnnnnnnnnnnnnnnnnnnnnnnnnnnnnnnnnnnnnnnnnnnnnnnnnnnnnnnnnnnnnnnnnnnnnnnnnnnnnnnnnnnnnnnnnnnnnnnnnnnnnnnnnnnnnnnnnnnnnnnnnnnnnnnnnnnnnnnnnnnnnnnnnnnnnnnnnnnnnnnnnnnnnnnnnnnnnnnnnnnnnnnnnnnnnnnnnnnnnnnnnnnnnnnnnnnnnnnnnnnnnnnnnnnnnnnnnnnnnnnnnnnnnnnnnnnnnnnnnnnnnnnnnnnnnnnnnnnnnnnnnnnnnnnnnnnnnnnnnnnnnnnnnnnnnnnnnnnnnnnnnnnnnnnnnnnnnnnnnnnnnnnnnnnnnnnnnnnnnnnnnnnnnnnnnnnnnnnnnnnnnnnnnnnnnnnnnnnnnnnnnnnnnnnnnnnnnnnnnnnnnnnnnnnnnnnnnnnnnnnnnnnnnnnnnnnnnnnnnnnnnnnnnnnnnnnnnnnnnnnnnnnnnnnnnnnnnnnnnnnnnnnnnnnnnnnnnnnnnnnnnnnnnnnnnnnnnnnnnnnnnnnnnnnnnnnnnnnnnnnnnnnnnnnnnnnnnnnnnnnnnnnnnnnnnnnnnnnnnnnnnnnnnnnnnnnnnnnnnnnnnnnnnnnnnnnnnnnnnnnnnnnnnnnnnnnnnnnnnnnnnnnnnnnnnnnnnnnnnnnnnnnnnnnnnnnnnnnnnnnnnnnnnnnnnnnnnnnnnnnnnnnnnnnnnnnnnnnnnnnnnnnnnnnnnnnnnnnnnnnnnnnnnnnnnnnnnnnnnnnnnnnnnnnnnnnnnnnnnnnnnnnnnnnnnnnnnnnnnnnnnnnnnnnnnnnnnnnnnnnnnnnnnnnnnnnnnnnnnnnnnnnnnnnnnnnnnnnnnnnnnnnnnnnnnnnnnnnnnnnnnnnnnnnnnnnnnnnnnnnnnnnnnnnnnnnnnnnnnnnnnnnnnnnnnnnnnnnnnnnnnnnnnnnnnnnnnnnnnnnnnnnnnnnnnnnnnnnnnnnnnnnnnnnnnnnnnnnnnnnnnnnnnnnnnnnnnnnnnnnnnnnnnnnnnnnnnnnnnnnnnnnnnnnnnnnnnnnnnnnnnnnnnnnnnnnnnnnnnnnnnnnnnnnnnnnnnnnnnnnnnnnnnnnnnnnnnnnnnnnnnnnnnnnnnnnnnnnnnnnnnnnnnnnnnnnnnnnnnnnnnnnnnnnnnnnnnnnnnnnnnnnnnnnnnnnnnnnnnnnnnnnnnnnnnnnnnnnnnnnnnnnnnnnnnnnnnnnnnnnnnnnnnnnnnnnnnnnnnnnnnnnnnnnnnnnnnnnnnnnnnnnnnnnnnnnnnnnnnnnnnnnnnnnnnnnnnnnnnnnnnnnnnnnnnnnnnnnnnnnnnnnnnnnnnnnnnnnnnnnnnnnnnnnnnnnnnnnnnnnnnnnnnnnnnnnnnnnnnnnnnnnnnnnnnnnnnnnnnnnnnnnnnnnnnnnnnnnnnnnnnnnnnnnnnnnnnnnnnnnnnnnnnnnnnnnnnnnnnnnnnnnnnnnnnnnnnnnnnnnnnnnnnnnnnnnnnnnnnnnnnnnnnnnnnnnnnnnnnnnnnnnnnnnnnnnnnnnnnnnnnnnnnnnnnnnnnnnnnnnnnnnnnnnnnnnnnnnnnnnnnnnnnnnnnnnnnnnnnnnnnnnnnnnnnnnnnnnnnnnnnnnnnnnnnnnnnnnnnnnnnnnnnnnnnnnnnnnnnnnnnnnnnnnnnnnnnnnnnnnnnnnnnnnnnnnnnnnnnnnnnnnnnnnnnnnnnnnnnnnnnnnnnnnnnnnnnnnnnnnnnnnnnnnnnnnnnnnnnnnnnnnnnnnnnnnnnnnnnnnnnnnnnnnnnnnnnnnnnnnnnnnnnnnnnnnnnnnnnnnnnnnnnnnnnnnnnnnnnnnnnnnnnnnnnnnnnnnnnnnnnnnnnnnnnnnnnnnnnnnnnnnnnnnnnnnnnnnnnnnnnnnnnnnnnnnnnnnnnnnnnnnnnnnnnnnnnnnnnnnnnnnnnnnnnnnnnnnnnnnnnnnnnnnnnnnnnnnnnnnnnnnnnnnnnnnnnnnnnnnnnnnnnnnnnnnnnnnnnnnnnnnnnnnnnnnnnnnnnnnnnnnnnnnnnnnnnnnnnnnnnnnnnnnnnnnnnnnnnnnnnnnnnnnnnnnnnnnnnnnnnnnnnnnnnnnnnnnnnnnnnnnnnnnnnnnnnnnnnnnnnnnnnnnnnnnnnnnnnnnnnnnnnnnnnnnnnnnnnnnnnnnnnnnnnnnnnnnnnnnnnnnnnnnnnnnnnnnnnnnnnnnnnnnnnnnnnnnnnnnnnnnnnnnnnnnnnnnnnnnnnnnnnnnnnnnnnnnnnnnnnnnnnnnnnnnnnnnnnnnnnnnnnnnnnnnnnnnnnnnnnnnnnnnnnnnnnnnnnnnnnnnnnnnnnnnnnnnnnnnnnnnnnnnnnnnnnnnnnnnnnnnnnnnnnnnnnnnnnnnnnnnnnnnnnnnnnnnnnnnnnnnnnnnnnnnnnnnnnnnnnnnnnnnnnnnnnnnnnnnnnnnnnnnnnnnnnnnnnnnnnnnnnnnnnnnnnnnnnnnnnnnnnnnnnnnnnnnnnnnnnnnnnnnnnnnnnnnnnnnnnnnnnnnnnnnnnnnnnnnnnnnnnnnnnnnnnnnnnnnnnnnnnnnnnnnnnnnnnnnnnnnnnnnnnnnnnnnnnnnnnnnnnnnnnnnnnnnnnnnnnnnnnnnnnnnnnnnnnnnnnnnnnnnnnnnnnnnnnnnnnnnnnnnnnnnnnnnnnnnnnnnnnnnnnnnnnnnnnnnnnnnnnnnnnnnnnnnnnnnnnnnnnnnnnnnnnnnnnnnnnnnnnnnnnnnnnnnnnnnnnnnnnnnnnnnnnnnnnnnnnnnnnnnnnnnnnnnnnnnnnnnnnnnnnnnnnnnnnnnnnnnnnnnnnnnnnnnnnnnnnnnnnnnnnnnnnnnnnnnnnnnnnnnnnnnnnnnnnnnnnnnnnnnnnnnnnnnnnnnnnnnnnnnnnnnnnnnnnnnnnnnnnnnnnnnnnnnnnnnnnnnnnnnnnnnnnnnnnnnnnnnnnnnnnnnnnnnnnnnnnnnnnnnnnnnnnnnnnnnnnnnnnnnnnnnnnnnnnnnnnnnnnnnnnnnnnnnnnnnnnnnnnnnnnnnnnnnnnnnnnnnnnnnnnnnnnnnnnnnnnnnnnnnnnnnnnnnnnnnnnnnnnnnnnnnnnnnnnnnnnnnnnnnnnnnnnnnnnnnnnnnnnnnnnnnnnnnnnnnnnnnnnnnnnnnnnnnnnnnnnnnnnnnnnnnnnnnnnnnnnnnnnnnnnnnnnnnnnnnnnnnnnnnnnnnnnnnnnnnnnnnnnnnnnnnnnnnnnnnnnnnnnnnnnnnnnnnnnnnnnnnnnnnnnnnnnnnnnnnnnnnnnnnnnnnnnnnnnnnnnnnnnnnnnnnnnnnnnnnnnnnnnnnnnnnnnnnnnnnnnnnnnnnnnnnnnnnnnnnnnnnnnnnnnnnnnnnnnnnnnnnnnnnnnnnnnnnnnnnnnnnnnnnnnnnnnnnnnnnnnnnnnnnnnnnnnnnnnnnnnnnnnnnnnnnnnnnnnnnnnnnnnnnnnnnnnnnnnnnnnnnnnnnnnnnnnnnnnnnnnnnnnnnnnnnnnnnnnnnnnnnnnnnnnnnnnnnnnnnnnnnnnnnnnnnnnnnnnnnnnnnnnnnnnnnnnnnnnnnnnnnnnnnnnnnnnnnnnnnnnnnnnnnnnnnnnnnnnnnnnnnnnnnnnnnnnnnnnnnnnnnnnnnnnnnnnnnnnnnnnnnnnnnnnnnnnnnnnnnnnnnnnnnnnnnnnnnnnnnnnnnnnnnnnnnnnnnnnnnnnnnnnnnnnnnnnnnnnnnnnnnnnnnnnnnnnnnnnnnnnnnnnnnnnnnnnnnnnnnnnnnnnnnnnnnnnnnnnnnnnnnnnnnnnnnnnnnnnnnnnnnnnnnnnnnnnnnnnnnnnnnnnnnnnnnnnnnnnnnnnnnnnnnnnnnnnnnnnnnnnnnnnnnnnnnnnnnnnnnnnnnnnnnnnnnnnnnnnnnnnnnnnnnnnnnnnnnnnnnnnnnnnnnnnnnnnnnnnnnnnnnnnnnnnnnnnnnnnnnnnnnnnnnnnnnnnnnnnnnnnnnnnnnnnnnnnnnnnnnnnnnnnnnnnnnnnnnnnnnnnnnnnnnnnnnnnnnnnnnnnnnnnnnnnnnnnnnnnnnnnnnnnnnnnnnnnnnnnnnnnnnnnnnnnnnnnnnnnnnnnnnnnnnnnnnnnnnnnnnnnnnnnnnnnnnnnnnnnnnnnnnnnnnnnnnnnnnnnnnnnnnnnnnnnnnnnnnnnnnnnnnnnnnnnnnnnnnnnnnnnnnnnnnnnnnnnnnnnnnnnnnnnnnnnnnnnnnnnnnnnnnnnnnnnnnnnnnnnnnnnnnnnnnnnnnnnnnnnnnnnnnnnnnnnnnnnnnnnnnnnnnnnnnnnnnnnnnnnnnnnnnnnnnnnnnnnnnnnnnnnnnnnnnnnnnnnnnnnnnnnnnnnnnnnnnnnnnnnnnnnnnnnnnnnnnnnnnnnnnnnnnnnnnnnnnnnnnnnnnnnnnnnnnnnnnnnnnnnnnnnnnnnnnnnnnnnnnnnnnnnnnnnnnnnnnnnnnnnnnnnnnnnnnnnnnnnnnnnnnnnnnnnnnnnnnnnnnnnnnnnnnnnnnnnnnnnnnnnnnnnnnnnnnnnnnnnnnnnnnnnnnnnnnnnnnnnnnnnnnnnnnnnnnnnnnnnnnnnnnnnnnnnnnnnnnnnnnnnnnnnnnnnnnnnnnnnnnnnnnnnnnnnnnnnnnnnnnnnnnnnnnnnnnnnnnnnnnnnnnnnnnnnnnnnnnnnnnnnnnnnnnnnnnnnnnnnnnnnnnnnnnnnnnnnnnnnnnnnnnnnnnnnnnnnnnnnnnnnnnnnnnnnnnnnnnnnnnnnnnnnnnnnnnnnnnnnnnnnnnnnnnnnnnnnnnnnnnnnnnnnnnnnnnnnnnnnnnnnnnnnnnnnnnnnnnnnnnnnnnnnnnnnnnnnnnnnnnnnnnnnnnnnnnnnnnnnnnnnnnnnnnnnnnnnnnnnnnnnnnnnnnnnnnnnnnnnnnnnnnnnnnnnnnnnnnnnnnnnnnnnnnnnnnnnnnnnnnnnnnnnnnnnnnnnnnnnnnnnnnnnnnnnnnnnnnnnnnnnnnnnnnnnnnnnnnnnnnnnnnnnnnnnnnnnnnnnnnnnnnnnnnnnnnnnnnnnnnnnnnnnnnnnnnnnnnnnnnnnnnnnnnnnnnnnnnnnnnnnnnnnnnnnnnnnnnnnnnnnnnnnnnnnnnnnnnnnnnnnnnnnnnnnnnnnnnnnnnnnnnnnnnnnnnnnnnnnnnnnnnnnnnnnnnnnnnnnnnnnnnnnnnnnnnnnnnnnnnnnnnnnnnnnnnnnnnnnnnnnnnnnnnnnnnnnnnnnnnnnnnnnnnnnnnnnnnnnnnnnnnnnnnnnnnnnnnnnnnnnnnnnnnnnnnnnnnnnnnnnnnnnnnnnnnnnnnnnnnnnnnnnnnnnnnnnnnnnnnnnnnnnnnnnnnnnnnnnnnnnnnnnnnnnnnnnnnnnnnnnnnnnnnnnnnnnnnnnnnnnnnnnnnnnnnnnnnnnnnnnnnnnnnnnnnnnnnnnnnnnnnnnnnnnnnnnnnnnnnnnnnnnnnnnnnnnnnnnnnnnnnnnnnnnnnnnnnnnnnnnnnnnnnnnnnnnnnnnnnnnnnnnnnnnnnnnnnnnnnnnnnnnnnnnnnnnnnnnnnnnnnnnnnnnnnnnnnnnnnnnnnnnnnnnnnnnnnnnnnnnnnnnnnnnnnnnnnnnnnnnnnnnnnnnnnnnnnnnnnnnnnnnnnnnnnnnnnnnnnnnnnnnnnnnnnnnnnnnnnnnnnnnnnnnnnnnnnnnnnnnnnnnnnnnnnnnnnnnnnnnnnnnnnnnnnnnnnnnnnnnnnnnnnnnnnnnnnnnnnnnnnnnnnnnnnnnnnnnnnnnnnnnnnnnnnnnnnnnnnnnnnnnnnnnnnnnnnnnnnnnnnnnnnnnnnnnnnnnnnnnnnnnnnnnnnnnnnnnnnnnnnnnnnnnnnnnnnnnnnnnnnnnnnnnnnnnnnnnnnnnnnnnnnnnnnnnnnnnnnnnnnnnnnnnnnnnnnnnnnnnnnnnnnnnnnnnnnnnnnnnnnnnnnnnnnnnnnnnnnnnnnnnnnnnnnnnnnnnnnnnnnnnnnnnnnnnnnnnnnnnnnnnnnnnnnnnnnnnnnnnnnnnnnnnnnnnnnnnnnnnnnnnnnnnnnnnnnnnnnnnnnnnnnnnnnnnnnnnnnnnnnnnnnnnnnnnnnnnnnnnnnnnnnnnnnnnnnnnnnnnnnnnnnnnnnnnnnnnnnnnnnnnnnnnnnnnnnnnnnnnnnnnnnnnnnnnnnnnnnnnnnnnnnnnnnnnnnnnnnnnnnnnnnnnnnnnnnnnnnnnnnnnnnnnnnnnnnnnnnnnnnnnnnnnnnnnnnnnnnnnnnnnnnnnnnnnnnnnnnnnnnnnnnnnnnnnnnnnnnnnnnnnnnnnnnnnnnnnnnnnnnnnnnnnnnnnnnnnnnnnnnnnnnnnnnnnnnnnnnnnnnnnnnnnnnnnnnnnnnnnnnnnnnnnnnnnnnnnnnnnnnnnnnnnnnnnnnnnnnnnnnnnnnnnnnnnnnnnnnnnnnnnnnnnnnnnnnnnnnnnnnnnnnnnnnnnnnnnnnnnnnnnnnnnnnnnnnnnnnnnnnnnnnnnnnnnnnnnnnnnnnnnnnnnnnnnnnnnnnnnnnnnnnnnnnnnnnnnnnnnnnnnnnnnnnnnnnnnnnnnnnnnnnnnnnnnnnnnnnnnnnnnnnnnnnnnnnnnnnnnnnnnnnnnnnnnnnnnnnnnnnnnnnnnnnnnnnnnnnnnnnnnnnnnnnnnnnnnnnnnnnnnnnnnnnnnnnnnnnnnnnnnnnnnnnnnnnnnnnnnnnnnnnnnnnnnnnnnnnnnnnnnnnnnnnnnnnnnnnnnnnnnnnnnnnnnnnnnnnnnnnnnnnnnnnnnnnnnnnnnnnnnnnnnnnnnnnnnnnnnnnnnnnnnnnnnnnnnnnnnnnnnnnnnnnnnnnnnnnnnnnnnnnnnnnnnnnnnnnnnnnnnnnnnnnnnnnnnnnnnnnnnnnnnnnnnnnnnnnnnnnnnnnnnnnnnnnnnnnnnnnnnnnnnnnnnnnnnnnnnnnnnnnnnnnnnnnnnnnnnnnnnnnnnnnnnnnnnnnnnnnnnnnnnnnnnnnnnnnnnnnnnnnnnnnnnnnnnnnnnnnnnnnnnnnnnnnnnnnnnnnnnnnnnnnnnnnnnnnnnnnnnnnnnnnnnnnnnnnnnnnnnnnnnnnnnnnnnnnnnnnnnnnnnnnnnnnnnnnnnnnnnnnnnnnnnnnnnnnnnnnnnnnnnnnnnnnnnnnnnnnnnnnnnnnnnnnnnnnnnnnnnnnnnnnnnnnnnnnnnnnnnnnnnnnnnnnnnnnnnnnnnnnnnnnnnnnnnnnnnnnnnnnnnnnnnnnnnnnnnnnnnnnnnnnnnnnnnnnnnnnnnnnnnnnnnnnnnnnnnnnnnnnnnnnnnnnnnnnnnnnnnnnnnnnnnnnnnnnnnnnnnnnnnnnnnnnnnnnnnnnnnnnnnnnnnnnnnnnnnnnnnnnnnnnnnnnnnnnnnnnnnnnnnnnnnnnnnnnnnnnnnnnnnnnnnnnnnnnnnnnnnnnnnnnnnnnnnnnnnnnnnnnnnnnnnnnnnnnnnnnnnnnnnnnnnnnnnnnnnnnnnnnnnnnnnnnnnnnnnnnnnnnnnnnnnnnnnnnnnnnnnnnnnnnnnnnnnnnnnnnnnnnnnnnnnnnnnnnnnnnnnnnnnnnnnnnnnnnnnnnnnnnnnnnnnnnnnnnnnnnnnnnnnnnnnnnnnnnnnnnnnnnnnnnnnnnnnnnnnnnnnnnnnnnnnnnnnnnnnnnnnnnnnnnnnnnnnnnnnnnnnnnnnnnnnnnnnnnnnnnnnnnnnnnnnnnnnnnnnnnnnnnnnnnnnnnnnnnnnnnnnnnnnnnnnnnnnnnnnnnnnnnnnnnnnnnnnnnnnnnnnnnnnnnnnnnnnnnnnnnnnnnnnnnnnnnnnnnnnnnnnnnnnnnnnnnnnnnnnnnnnnnnnnnnnnnnnnnnnnnnnnnnnnnnnnnnnnnnnnnnnnnnnnnnnnnnnnnnnnnnnnnnnnnnnnnnnnnnnnnnnnnnnnnnnnnnnnnnnnnnnnnnnnnnnnnnnnnnnnnnnnnnnnnnnnnnnnnnnnnnnnnnnnnnnnnnnnnnnnnnnnnnnnnnnnnnnnnnnnnnnnnnnnnnnnnnnnnnnnnnnnnnnnnnnnnnnnnnnnnnnnnnnnnnnnnnnnnnnnnnnnnnnnnnnnnnnnnnnnnnnnnnnnnnnnnnnnnnnnnnnnnnnnnnnnnnnnnnnnnnnnnnnnnnnnnnnnnnnnnnnnnnnnnnnnnnnnnnnnnnnnnnnnnnnnnnnnnnnnnnnnnnnnnnnnnnnnnnnnnnnnnnnnnnnnnnnnnnnnnnnnnnnnnnnnnnnnnnnnnnnnnnnnnnnnnnnnnnnnnnnnnnnnnnnnnnnnnnnnnnnnnnnnnnnnnnnnnnnnnnnnnnnnnnnnnnnnnnnnnnnnnnnnnnnnnnnnnnnnnnnnnnnnnnnnnnnnnnnnnnnnnnnnnnnnnnnnnnnnnnnnnnnnnnnnnnnnnnnnnnnnnnnnnnnnnnnnnnnnnnnnnnnnnnnnnnnnnnnnnnnnnnnnnnnnnnnnnnnnnnnnnnnnnnnnnnnnnnnnnnnnnnnnnnnnnnnnnnnnnnnnnnnnnnnnnnnnnnnnnnnnnnnnnnnnnnnnnnnnnnnnnnnnnnnnnnnnnnnnnnnnnnnnnnnnnnnnnnnnnnnnnnnnnnnnnnnnnnnnnnnnnnnnnnnnnnnnnnnnnnnnnnnnnnnnnnnnnnnnnnnnnnnnnnnnnnnnnnnnnnnnnnnnnnnnnnnnnnnnnnnnnnnnnnnnnnnnnnnnnnnnnnnnnnnnnnnnnnnnnnnnnnnnnnnnnnnnnnnnnnnnnnnnnnnnnnnnnnnnnnnnnnnnnnnnnnnnnnnnnnnnnnnnnnnnnnnnnnnnnnnnnnnnnnnnnnnnnnnnnnnnnnnnnnnnnnnnnnnnnnnnnnnnnnnnnnnnnnnnnnnnnnnnnnnnnnnnnnnnnnnnnnnnnnnnnnnnnnnnnnnnnnnnnnnnnnnnnnnnnnnnnnnnnnnnnnnnnnnnnnnnnnnnnnnnnnnnnnnnnnnnnnnnnnnnnnnnnnnnnnnnnnnnnnnnnnnnnnnnnnnnnnnnnnnnnnnnnnnnnnnnnnnnnnnnnnnnnnnnnnnnnnnnnnnnnnnnnnnnnnnnnnnnnnnnnnnnnnnnnnnnnnnnnnnnnnnnnnnnnnnnnnnnnnnnnnnnnnnnnnnnnnnnnnnnnnnnnnnnnnnnnnnnnnnnnnnnnnnnnnnnnnnnnnnnnnnnnnnnnnnnnnnnnnnnnnnnnnnnnnnnnnnnnnnnnnnnnnnnnnnnnnnnnnnnnnnnnnnnnnnnnnnnnnnnnnnnnnnnnnnnnnnnnnnnnnnnnnnnnnnnnnnnnnnnnnnnnnnnnnnnnnnnnnnnnnnnnnnnnnnnnnnnnnnnnnnnnnnnnnnnnnnnnnnnnnnnnnnnnnnnnnnnnnnnnnnnnnnnnnnnnnnnnnnnnnnnnnnnnnnnnnnnnnnnnnnnnnnnnnnnnnnnnnnnnnnnnnnnnnnnnnnnnnnnnnnnnnnnnnnnnnnnnnnnnnnnnnnnnnnnnnnnnnnnnnnnnnnnnnnnnnnnnnnnnnnnnnnnnnnnnnnnnnnnnnnnnnnnnnnnnnnnnnnnnnnnnnnnnnnnnnnnnnnnnnnnnnnnnnnnnnnnnnnnnnnnnnnnnnnnnnnnnnnnnnnnnnnnnnnnnnnnnnnnnnnnnnnnnnnnnnnnnnnnnnnnnnnnnnnnnnnnnnnnnnnnnnnnnnnnnnnnnnnnnnnnnnnnnnnnnnnnnnnnnnnnnnnnnnnnnnnnnnnnnnnnnnnnnnnnnnnnnnnnnnnnnnnnnnnnnnnnnnnnnnnnnnnnnnnnnnnnnnnnnnnnnnnnnnnnnnnnnnnnnnnnnnnnnnnnnnnnnnnnnnnnnnnnnnnnnnnnnnnnnnnnnnnnnnnnnnnnnnnnnnnnnnnnnnnnnnnnnnnnnnnnnnnnnnnnnnnnnnnnnnnnnnnnnnnnnnnnnnnnnnnnnnnnnnnnnnnnnnnnnnnnnnnnnnnnnnnnnnnnnnnnnnnnnnnnnnnnnnnnnnnnnnnnnnnnnnnnnnnnnnnnnnnnnnnnnnnnnnnnnnnnnnnnnnnnnnnnnnnnnnnnnnnnnnnnnnnnnnnnnnnnnnnnnnnnnnnnnnnnnnnnnnnnnnnnnnnnnnnnnnnnnnnnnnnnnnnnnnnnnnnnnnnnnnnnnnnnnnnnnnnnnnnnnnnnnnnnnnnnnnnnnnnnnnnnnnnnnnnnnnnnnnnnnnnnnnnnnnnnnnnnnnnnnnnnnnnnnnnnnnnnnnnnnnnnnnnnnnnnnnnnnnnnnnnnnnnnnnnnnnnnnnnnnnnnnnnnnnnnnnnnnnnnnnnnnnnnnnnnnnnnnnnnnnnnnnnnnnnnnnnnnnnnnnnnnnnnnnnnnnnnnnnnnnnnnnnnnnnnnnnnnnnnnnnnnnnnnnnnnnnnnnnnnnnnnnnnnnnnnnnnnnnnnnnnnnnnnnnnnnnnnnnnnnnnnnnnnnnnnnnnnnnnnnnnnnnnnnnnnnnnnnnnnnnnnnnnnnnnnnnnnnnnnnnnnnnnnnnnnnnnnnnnnnnnnnnnnnnnnnnnnnnnnnnnnnnnnnnnnnnnnnnnnnnnnnnnnnnnnnnnnnnnnnnnnnnnnnnnnnnnnnnnnnnnnnnnnnnnnnnnnnnnnnnnnnnnnnnnnnnnnnnnnnnnnnnnnnnnnnnnnnnnnnnnnnnnnnnnnnnnnnnnnnnnnnnnnnnnnnnnnnnnnnnnnnnnnnnnnnnnnnnnnnnnnnnnnnnnnnnnnnnnnnnnnnnnnnnnnnnnnnnnnnnnnnnnnnnnnnnnnnnnnnnnnnnnnnnnnnnnnnnnnnnnnnnnnnnnnnnnnnnnnnnnnnnnnnnnnnnnnnnnnnnnnnnnnnnnnnnnnnnnnnnnnnnnnnnnnnnnnnnnnnnnnnnnnnnnnnnnnnnnnnnnnnnnnnnnnnnnnnnnnnnnnnnnnnnnnnnnnnnnnnnnnnnnnnnnnnnnnnnnnnnnnnnnnnnnnnnnnnnnnnnnnnnnnnnnnnnnnnnnnnnnnnnnnnnnnnnnnnnnnnnnnnnnnnnnnnnnnnnnnnnnnnnnnnnnnnnnnnnnnnnnnnnnnnnnnnnnnnnnnnnnnnnnnnnnnnnnnnnnnnnnnnnnnnnnnnnnnnnnnnnnnnnnnnnnnnnnnnnnnnnnnnnnnnnnnnnnnnnnnnnnnnnnnnnnnnnnnnnnnnnnnnnnnnnnnnnnnnnnnnnnnnnnnnnnnnnnnnnnnnnnnnnnnnnnnnnnnnnnnnnnnnnnnnnnnnnnnnnnnnnnnnnnnnnnnnnnnnnnnnnnnnnnnnnnnnnnnnnnnnnnnnnnnnnnnnnnnnnnnnnnnnnnnnnnnnnnnnnnnnnnnnnnnnnnnnnnnnnnnnnnnnnnnnnnnnnnnnnnnnnnnnnnnnnnnnnnnnnnnnnnnnnnnnnnnnnnnnnnnnnnnnnnnnnnnnnnnnnnnnnnnnnnnnnnnnnnnnnnnnnnnnnnnnnnnnnnnnnnnnnnnnnnnnnnnnnnnnnnnnnnnnnnnnnnnnnnnnnnnnnnnnnnnnnnnnnnnnnnnnnnnnnnnnnnnnnnnnnnnnnnnnnnnnnnnnnnnnnnnnnnnnnnnnnnnnnnnnnnnnnnnnnnnnnnnnnnnnnnnnnnnnnnnnnnnnnnnnnnnnnnnnnnnnnnnnnnnnnnnnnnnnnnnnnnnnnnnnnnnnnnnnnnnnnnnnnnnnnnnnnnnnnnnnnnnnnnnnnnnnnnnnnnnnnnnnnnnnnnnnnnnnnnnnnnnnnnnnnnnnnnnnnnnnnnnnnnnnnnnnnnnnnnnnnnnnnnnnnnnnnnnnnnnnnnnnnnnnnnnnnnnnnnnnnnnnnnnnnnnnnnnnnnnnnnnnnnnnnnnnnnnnnnnnnnnnnnnnnnnnnnnnnnnnnnnnnnnnnnnnnnnnnnnnnnnnnnnnnnnnnnnnnnnnnnnnnnnnnnnnnnnnnnnnnnnnnnnnnnnnnnnnnnnnnnnnnnnnnnnnnnnnnnnnnnnnnnnnnnnnnnnnnnnnnnnnnnnnnnnnnnnnnnnnnnnnnnnnnnnnnnnnnnnnnnnnnnnnnnnnnnnnnnnnnnnnnnnnnnnnnnnnnnnnnnnnnnnnnnnnnnnnnnnnnnnnnnnnnnnnnnnnnnnnnnnnnnnnnnnnnnnnnnnnnnnnnnnnnnnnnnnnnnnnnnnnnnnnnnnnnnnnnnnnnnnnnnnnnnnnnnnnnnnnnnnnnnnnnnnnnnnnnnnnnnnnnnnnnnnnnnnnnnnnnnnnnnnnnnnnnnnnnnnnnnnnnnnnnnnnnnnnnnnnnnnnnnnnnnnnnnnnnnnnnnnnnnnnnnnnnnnnnnnnnnnnnnnnnnnnnnnnnnnnnnnnnnnnnnnnnnnnnnnnnnnnnnnnnnnnnnnnnnnnnnnnnnnnnnnnnnnnnnnnnnnnnnnnnnnnnnnnnnnnnnnnnnnnnnnnnnnnnnnnnnnnnnnnnnnnnnnnnnnnnnnnnnnnnnnnnnnnnnnnnnnnnnnnnnnnnnnnnnnnnnnnnnnnnnnnnnnnnnnnnnnnnnnnnnnnnnnnnnnnnnnnnnnnnnnnnnnnnnnnnnnnnnnnnnnnnnnnnnnnnnnnnnnnnnnnnnnnnnnnnnnnnnnnnnnnnnnnnnnnnnnnnnnnnnnnnnnnnnnnnnnnnnnnnnnnnnnnnnnnnnnnnnnnnnnnnnnnnnnnnnnnnnnnnnnnnnnnnnnnnnnnnnnnnnnnnnnnnnnnnnnnnnnnnnnnnnnnnnnnnnnnnnnnnnnnnnnnnnnnnnnnnnnnnnnnnnnnnnnnnnnnnnnnnnnnnnnnnnnnnnnnnnnnnnnnnnnnnnnnnnnnnnnnnnnnnnnnnnnnnnnnnnnnnnnnnnnnnnnnnnnnnnnnnnnnnnnnnnnnnnnnnnnnnnnnnnnnnnnnnnnnnnnnnnnnnnnnnnnnnnnnnnnnnnnnnnnnnnnnnnnnnnnnnnnnnnnnnnnnnnnnnnnnnnnnnnnnnnnnnnnnnnnnnnnnnnnnnnnnnnnnnnnnnnnnnnnnnnnnnnnnnnnnnnnnnnnnnnnnnnnnnnnnnnnnnnnnnnnnnnnnnnnnnnnnnnnnnnnnnnnnnnnnnnnnnnnnnnnnnnnnnnnnnnnnnnnnnnnnnnnnnnnnnnnnnnnnnnnnnnnnnnnnnnnnnnnnnnnnnnnnnnnnnnnnnnnnnnnnnnnnnnnnnnnnnnnnnnnnnnnnnnnnnnnnnnnnnnnnnnnnnnnnnnnnnnnnnnnnnnnnnnnnnnnnnnnnnnnnnnnnnnnnnnnnnnnnnnnnnnnnnnnnnnnnnnnnnnnnnnnnnnnnnnnnnnnnnnnnnnnnnnnnnnnnnnnnnnnnnnnnnnnnnnnnnnnnnnnnnnnnnnnnnnnnnnnnnnnnnnnnnnnnnnnnnnnnnnnnnnnnnnnnnnnnnnnnnnnnnnnnnnnnnnnnnnnnnnnnnnnnnnnnnnnnnnnnnnnnnnnnnnnnnnnnnnnnnnnnnnnnnnnnnnnnnnnnnnnnnnnnnnnnnnnnnnnnnnnnnnnnnnnnnnnnnnnnnnnnnnnnnnnnnnnnnnnnnnnnnnnnnnnnnnnnnnnnnnnnnnnnnnnnnnnnnnnnnnnnnnnnnnnnnnnnnnnnnnnnnnnnnnnnnnnnnnnnnnnnnnnnnnnnnnnnnnnnnnnnnnnnnnnnnnnnnnnnnnnnnnnnnnnnnnnnnnnnnnnnnnnnnnnnnnnnnnnnnnnnnnnnnnnnnnnnnnnnnnnnnnnnnnnnnnnnnnnnnnnnnnnnnnnnnnnnnnnnnnnnnnnnnnnnnnnnnnnnnnnnnnnnnnnnnnnnnnnnnnnnnnnnnnnnnnnnnnnnnnnnnnnnnnnnnnnnnnnnnnnnnnnnnnnnnnnnnnnnnnnnnnnnnnnnnnnnnnnnnnnnnnnnnnnnnnnnnnnnnnnnnnnnnnnnnnnnnnnnnnnnnnnnnnnnnnnnnnnnnnnnnnnnnnnnnnnnnnnnnnnnnnnnnnnnnnnnnnnnnnnnnnnnnnnnnnnnnnnnnnnnnnnnnnnnnnnnnnnnnnnnnnnnnnnnnnnnnnnnnnnnnnnnnnnnnnnnnnnnnnnnnnnnnnnnnnnnnnnnnnnnnnnnnnnnnnnnnnnnnnnnnnnnnnnnnnnnnnnnnnnnnnnnnnnnnnnnnnnnnnnnnnnnnnnnnnnnnnnnnnnnnnnnnnnnnnnnnnnnnnnnnnnnnnnnnnnnnnnnnnnnnnnnnnnnnnnnnnnnnnnnnnnnnnnnnnnnnnnnnnnnnnnnnnnnnnnnnnnnnnnnnnnnnnnnnnnnnnnnnnnnnnnnnnnnnnnnnnnnnnnnnnnnnnnnnnnnnnnnnnnnnnnnnnnnnnnnnnnnnnnnnnnnnnnnnnnnnnnnnnnnnnnnnnnnnnnnnnnnnnnnnnnnnnnnnnnnnnnnnnnnnnnnnnnnnnnnnnnnnnnnnnnnnnnnnnnnnnnnnnnnnnnnnnnnnnnnnnnnnnnnnnnnnnnnnnnnnnnnnnnnnnnnnnnnnnnnnnnnnnnnnnnnnnnnnnnnnnnnnnnnnnnnnnnnnnnnnnnnnnnnnnnnnnnnnnnnnnnnnnnnnnnnnnnnnnnnnnnnnnnnnnnnnnnnnnnnnnnnnnnnnnnnnnnnnnnnnnnnnnnnnnnnnnnnnnnnnnnnnnnnnnnnnnnnnnnnnnnnnnnnnnnnnnnnnnnnnnnnnnnnnnnnnnnnnnnnnnnnnnnnnnnnnnnnnnnnnnnnnnnnnnnnnnnnnnnnnnnnnnnnnnnnnnnnnnnnnnnnnnnnnnnnnnnnnnnnnnnnnnnnnnnnnnnnnnnnnnnnnnnnnnnnnnnnnnnnnnnnnnnnnnnnnnnnnnnnnnnnnnnnnnnnnnnnnnnnnnnnnnnnnnnnnnnnnnnnnnnnnnnnnnnnnnnnnnnnnnnnnnnnnnnnnnnnnnnnnnnnnnnnnnnnnnnnnnnnnnnnnnnnnnnnnnnnnnnnnnnnnnnnnnnnnnnnnnnnnnnnnnnnnnnnnnnnnnnnnnnnnnnnnnnnnnnnnnnnnnnnnnnnnnnnnnnnnnnnnnnnnnnnnnnnnnnnnnnnnnnnnnnnnnnnnnnnnnnnnnnnnnnnnnnnnnnnnnnnnnnnnnnnnnnnnnnnnnnnnnnnnnnnnnnnnnnnnnnnnnnnnnnnnnnnnnnnnnnnnnnnnnnnnnnnnnnnnnnnnnnnnnnnnnnnnnnnnnnnnnnnnnnnnnnnnnnnnnnnnnnnnnnnnnnnnnnnnnnnnnnnnnnnnnnnnnnnnnnnnnnnnnnnnnnnnnnnnnnnnnnnnnnnnnnnnnnnnnnnnnnnnnnnnnnnnnnnnnnnnnnnnnnnnnnnnnnnnnnnnnnnnnnnnnnnnnnnnnnnnnnnnnnnnnnnnnnnnnnnnnnnnnnnnnnnnnnnnnnnnnnnnnnnnnnnnnnnnnnnnnnnnnnnnnnnnnnnnnnnnnnnnnnnnnnnnnnnnnnnnnnnnnnnnnnnnnnnnnnnnnnnnnnnnnnnnnnnnnnnnnnnnnnnnnnnnnnnnnnnnnnnnnnnnnnnnnnnnnnnnnnnnnnnnnnnnnnnnnnnnnnnnnnnnnnnnnnnnnnnnnnnnnnnnnnnnnnnnnnnnnnnnnnnnnnnnnnnnnnnnnnnnnnnnnnnnnnnnnnnnnnnnnnnnnnnnnnnnnnnnnnnnnnnnnnnnnnnnnnnnnnnnnnnnnnnnnnnnnnnnnnnnnnnnnnnnnnnnnnnnnnnnnnnnnnnnnnnnnnnnnnnnnnnnnnnnnnnnnnnnnnnnnnnnnnnnnnnnnnnnnnnnnnnnnnnnnnnnnnnnnnnnnnnnnnnnnnnnnnnnnnnnnnnnnnnnnnnnnnnnnnnnnnnnnnnnnnnnnnnnnnnnnnnnnnnnnnnnnnnnnnnnnnnnnnnnnnnnnnnnnnnnnnnnnnnnnnnnnnnnnnnnnnnnnnnnnnnnnnnnnnnnnnnnnnnnnnnnnnnnnnnnnnnnnnnnnnnnnnnnnnnnnnnnnnnnnnnnnnnnnnnnnnnnnnnnnnnnnnnnnnnnnnnnnnnnnnnnnnnnnnnnnnnnnnnnnnnnnnnnnnnnnnnnnnnnnnnnnnnnnnnnnnnnnnnnnnnnnnnnnnnnnnnnnnnnnnnnnnnnnnnnnnnnnnnnnnnnnnnnnnnnnnnnnnnnnnnnnnnnnnnnnnnnnnnnnnnnnnnnnnnnnnnnnnnnnnnnnnnnnnnnnnnnnnnnnnnnnnnnnnnnnnnnnnnnnnnnnnnnnnnnnnnnnnnnnnnnnnnnnnnnnnnnnnnnnnnnnnnnnnnnnnnnnnnnnnnnnnnnnnnnnnnnnnnnnnnnnnnnnnnnnnnnnnnnnnnnnnnnnnnnnnnnnnnnnnnnnnnnnnnnnnnnnnnnnnnnnnnnnnnnnnnnnnnnnnnnnnnnnnnnnnnnnnnnnnnnnnnnnnnnnnnnnnnnnnnnnnnnnnnnnnnnnnnnnnnnnnnnnnnnnnnnnnnnnnnnnnnnnnnnnnnnnnnnnnnnnnnnnnnnnnnnnnnnnnnnnnnnnnnnnnnnnnnnnnnnnnnnnnnnnnnnnnnnnnnnnnnnnnnnnnnnnnnnnnnnnnnnnnnnnnnnnnnnnnnnnnnnnnnnnnnnnnnnnnnnnnnnnnnnnnnnnnnnnnnnnnnnnnnnnnnnnnnnnnnnnnnnnnnnnnnnnnnnnnnnnnnnnnnnnnnnnnnnnnnnnnnnnnnnnnnnnnnnnnnnnnnnnnnnnnnnnnnnnnnnnnnnnnnnnnnnnnnnnnnnnnnnnnnnnnnnnnnnnnnnnnnnnnnnnnnnnnnnnnnnnnnnnnnnnnnnnnnnnnnnnnnnnnnnnnnnnnnnnnnnnnnnnnnnnnnnnnnnnnnnnnnnnnnnnnnnnnnnnnnnnnnnnnnnnnnnnnnnnnnnnnnnnnnnnnnnnnnnnnnnnnnnnnnnnnnnnnnnnnnnnnnnnnnnnnnnnnnnnnnnnnnnnnnnnnnnnnnnnnnnnnnnnnnnnnnnnnnnnnnnnnnnnnnnnnnnnnnnnnnnnnnnnnnnnnnnnnnnnnnnnnnnnnnnnnnnnnnnnnnnnnnnnnnnnnnnnnnnnnnnnnnnnnnnnnnnnnnnnnnnnnnnnnnnnnnnnnnnnnnnnnnnnnnnnnnnnnnnnnnnnnnnnnnnnnnnnnnnnnnnnnnnnnnnnnnnnnnnnnnnnnnnnnnnnnnnnnnnnnnnnnnnnnnnnnnnnnnnnnnnnnnnnnnnnnnnnnnnnnnnnnnnnnnnnnnnnnnnnnnnnnnnnnnnnnnnnnnnnnnnnnnnnnnnnnnnnnnnnnnnnnnnnnnnnnnnnnnnnnnnnnnnnnnnnnnnnnnnnnnnnnnnnnnnnnnnnnnnnnnnnnnnnnnnnnnnnnnnnnnnnnnnnnnnnnnnnnnnnnnnnnnnnnnnnnnnnnnnnnnnnnnnnnnnnnnnnnnnnnnnnnnnnnnnnnnnnnnnnnnnnnnnnnnnnnnnnnnnnnnnnnnnnnnnnnnnnnnnnnnnnnnnnnnnnnnnnnnnnnnnnnnnnnnnnnnnnnnnnnnnnnnnnnnnnnnnnnnnnnnnnnnnnnnnnnnnnnnnnnnnnnnnnnnnnnnnnnnnnnnnnnnnnnnnnnnnnnnnnnnnnnnnnnnnnnnnnnnnnnnnnnnnnnnnnnnnnnnnnnnnnnnnnnnnnnnnnnnnnnnnnnnnnnnnnnnnnnnnnnnnnnnnnnnnnnnnnnnnnnnnnnnnnnnnnnnnnnnnnnnnnnnnnnnnnnnnnnnnnnnnnnnnnnnnnnnnnnnnnnnnnnnnnnnnnnnnnnnnnnnnnnnnnnnnnnnnnnnnnnnnnnnnnnnnnnnnnnnnnnnnnnnnnnnnnnnnnnnnnnnnnnnnnnnnnnnnnnnnnnnnnnnnnnnnnnnnnnnnnnnnnnnnnnnnnnnnnnnnnnnnnnnnnnnnnnnnnnnnnnnnnnnnnnnnnnnnnnnnnnnnnnnnnnnnnnnnnnnnnnnnnnnnnnnnnnnnnnnnnnnnnnnnnnnnnnnnnnnnnnnnnnnnnnnnnnnnnnnnnnnnnnnnnnnnnnnnnnnnnnnnnnnnnnnnnnnnnnnnnnnnnnnnnnnnnnnnnnnnnnnnnnnnnnnnnnnnnnnnnnnnnnnnnnnnnnnnnnnnnnnnnnnnnnnnnnnnnnnnnnnnnnnnnnnnnnnnnnnnnnnnnnnnnnnnnnnnnnnnnnnnnnnnnnnnnnnnnnnnnnnnnnnnnnnnnnnnnnnnnnnnnnnnnnnnnnnnnnnnnnnnnnnnnnnnnnnnnnnnnnnnnnnnnnnnnnnnnnnnnnnnnnnnnnnnnnnnnnnnnnnnnnnnnnnnnnnnnnnnnnnnnnnnnnnnnnnnnnnnnnnnnnnnnnnnnnnnnnnnnnnnnnnnnnnnnnnnnnnnnnnnnnnnnnnnnnnnnnnnnnnnnnnnnnnnnnnnnnnnnnnnnnnnnnnnnnnnnnnnnnnnnnnnnnnnnnnnnnnnnnnnnnnnnnnnnnnnnnnnnnnnnnnnnnnnnnnnnnnnnnnnnnnnnnnnnnnnnnnnnnnnnnnnnnnnnnnnnnnnnnnnnnnnnnnnnnnnnnnnnnnnnnnnnnnnnnnnnnnnnnnnnnnnnnnnnnnnnnnnnnnnnnnnnnnnnnnnnnnnnnnnnnnnnnnnnnnnnnnnnnnnnnnnnnnnnnnnnnnnnnnnnnnnnnnnnnnnnnnnnnnnnnnnnnnnnnnnnnnnnnnnnnnnnnnnnnnnnnnnnnnnnnnnnnnnnnnnnnnnnnnnnnnnnnnnnnnnnnnnnnnnnnnnnnnnnnnnnnnnnnnnnnnnnnnnnnnnnnnnnnnnnnnnnnnnnnnnnnnnnnnnnnnnnnnnnnnnnnnnnnnnnnnnnnnnnnnnnnnnnnnnnnnnnnnnnnnnnnnnnnnnnnnnnnnnnnnnnnnnnnnnnnnnnnnnnnnnnnnnnnnnnnnnnnnnnnnnnnnnnnnnnnnnnnnnnnnnnnnnnnnnnnnnnnnnnnnnnnnnnnnnnnnnnnnnnnnnnnnnnnnnnnnnnnnnnnnnnnnnnnnnnnnnnnnnnnnnnnnnnnnnnnnnnnnnnnnnnnnnnnnnnnnnnnnnnnnnnnnnnnnnnnnnnnnnnnnnnnnnnnnnnnnnnnnnnnnnnnnnnnnnnnnnnnnnnnnnnnnnnnnnnnnnnnnnnnnnnnnnnnnnnnnnnnnnnnnnnnnnnnnnnnnnnnnnnnnnnnnnnnnnnnnnnnnnnnnnnnnnnnnnnnnnnnnnnnnnnnnnnnnnnnnnnnnnnnnnnnnnnnnnnnnnnnnnnnnnnnnnnnnnnnnnnnnnnnnnnnnnnnnnnnnnnnnnnnnnnnnnnnnnnnnnnnnnnnnnnnnnnnnnnnnnnnnnnnnnnnnnnnnnnnnnnnnnnnnnnnnnnnnnnnnnnnnnnnnnnnnnnnnnnnnnnnnnnnnnnnnnnnnnnnnnnnnnnnnnnnnnnnnnnnnnnnnnnnnnnnnnnnnnnnnnnnnnnnnnnnnnnnnnnnnnnnnnnnnnnnnnnnnnnnnnnnnnnnnnnnnnnnnnnnnnnnnnnnnnnnnnnnnnnnnnnnnnnnnnnnnnnnnnnnnnnnnnnnnnnnnnnnnnnnnnnnnnnnnnnnnnnnnnnnnnnnnnnnnnnnnnnnnnnnnnnnnnnnnnnnnnnnnnnnnnnnnnnnnnnnnnnnnnnnnnnnnnnnnnnnnnnnnnnnnnnnnnnnnnnnnnnnnnnnnnnnnnnnnnnnnnnnnnnnnnnnnnnnnnnnnnnnnnnnnnnnnnnnnnnnnnnnnnnnnnnnnnnnnnnnnnnnnnnnnnnnnnnnnnnnnnnnnnnnnnnnnnnnnnnnnnnnnnnnnnnnnnnnnnnnnnnnnnnnnnnnnnnnnnnnnnnnnnnnnnnnnnnnnnnnnnnnnnnnnnnnnnnnnnnnnnnnnnnnnnnnnnnnnnnnnnnnnnnnnnnnnnnnnnnnnnnnnnnnnnnnnnnnnnnnnnnnnnnnnnnnnnnnnnnnnnnnnnnnnnnnnnnnnnnnnnnnnnnnnnnnnnnnnnnnnnnnnnnnnnnnnnnnnnnnnnnnnnnnnnnnnnnnnnnnnnnnnnnnnnnnnnnnnnnnnnnnnnnnnnnnnnnnnnnnnnnnnnnnnnnnnnnnnnnnnnnnnnnnnnnnnnnnnnnnnnnnnnnnnnnnnnnnnnnnnnnnnnnnnnnnnnnnnnnnnnnnnnnnnnnnnnnnnnnnnnnnnnnnnnnnnnnnnnnnnnnnnnnnnnnnnnnnnnnnnnnnnnnnnnnnnnnnnnnnnnnnnnnnnnnnnnnnnnnnnnnnnnnnnnnnnnnnnnnnnnnnnnnnnnnnnnnnnnnnnnnnnnnnnnnnnnnnnnnnnnnnnnnnnnnnnnnnnnnnnnnnnnnnnnnnnnnnnnnnnnnnnnnnnnnnnnnnnnnnnnnnnnnnnnnnnnnnnnnnnnnnnnnnnnnnnnnnnnnnnnnnnnnnnnnnnnnnnnnnnnnnnnnnnnnnnnnnnnnnnnnnnnnnnnnnnnnnnnnnnnnnnnnnnnnnnnnnnnnnnnnnnnnnnnnnnnnnnnnnnnnnnnnnnnnnnnnnnnnnnnnnnnnnnnnnnnnnnnnnnnnnnnnnnnnnnnnnnnnnnnnnnnnnnnnnnnnnnnnnnnnnnnnnnnnnnnnnnnnnnnnnnnnnnnnnnnnnnnnnnnnnnnnnnnnnnnnnnnnnnnnnnnnnnnnnnnnnnnnnnnnnnnnnnnnnnnnnnnnnnnnnnnnnnnnnnnnnnnnnnnnnnnnnnnnnnnnnnnnnnnnnnnnnnnnnnnnnnnnnnnnnnnnnnnnnnnnnnnnnnnnnnnnnnnnnnnnnnnnnnnnnnnnnnnnnnnnnnnnnnnnnnnnnnnnnnnnnnnnnnnnnnnnnnnnnnnnnnnnnnnnnnnnnnnnnnnnnnnnnnnnnnnnnnnnnnnnnnnnnnnnnnnnnnnnnnnnnnnnnnnnnnnnnnnnnnnnnnnnnnnnnnnnnnnnnnnnnnnnnnnnnnnnnnnnnnnnnnnnnnnnnnnnnnnnnnnnnnnnnnnnnnnnnnnnnnnnnnnnnnnnnnnnnnnnnnnnnnnnnnnnnnnnnnnnnnnnnnnnnnnnnnnnnnnnnnnnnnnnnnnnnnnnnnnnnnnnnnnnnnnnnnnnnnnnnnnnnnnnnnnnnnnnnnnnnnnnnnnnnnnnnnnnnnnnnnnnnnnnnnnnnnnnnnnnnnnnnnnnnnnnnnnnnnnnnnnnnnnnnnnnnnnnnnnnnnnnnnnnnnnnnnnnnnnnnnnnnnnnnnnnnnnnnnnnnnnnnnnnnnnnnnnnnnnnnnnnnnnnnnnnnnnnnnnnnnnnnnnnnnnnnnnnnnnnnnnnnnnnnnnnnnnnnnnnnnnnnnnnnnnnnnnnnnnnnnnnnnnnnnnnnnnnnnnnnnnnnnnnnnnnnnnnnnnnnnnnnnnnnnnnnnnnnnnnnnnnnnnnnnnnnnnnnnnnnnnnnnnnnnnnnnnnnnnnnnnnnnnnnnnnnnnnnnnnnnnnnnnnnnnnnnnnnnnnnnnnnnnnnnnnnnnnnnnnnnnnnnnnnnnnnnnnnnnnnnnnnnnnnnnnnnnnnnnnnnnnnnnnnnnnnnnnnnnnnnnnnnnnnnnnnnnnnnnnnnnnnnnnnnnnnnnnnnnnnnnnnnnnnnnnnnnnnnnnnnnnnnnnnnnnnnnnnnnnnnnnnnnnnnnnnnnnnnnnnnnnnnnnnnnnnnnnnnnnnnnnnnnnnnnnnnnnnnnnnnnnnnnnnnnnnnnnnnnnnnnnnnnnnnnnnnnnnnnnnnnnnnnnnnnnnnnnnnnnnnnnnnnnnnnnnnnnnnnnnnnnnnnnnnnnnnnnnnnnnnnnnnnnnnnnnnnnnnnnnnnnnnnnnnnnnnnnnnnnnnnnnnnnnnnnnnnnnnnnnnnnnnnnnnnnnnnnnnnnnnnnnnnnnnnnnnnnnnnnnnnnnnnnnnnnnnnnnnnnnnnnnnnnnnnnnnnnnnnnnnnnnnnnnnnnnnnnnnnnnnnnnnnnnnnnnnnnnnnnnnnnnnnnnnnnnnnnnnnnnnnnnnnnnnnnnnnnnnnnnnnnnnnnnnnnnnnnnnnnnnnnnnnnnnnnnnnnnnnnnnnnnnnnnnnnnnnnnnnnnnnnnnnnnnnnnnnnnnnnnnnnnnnnnnnnnnnnnnnnnnnnnnnnnnnnnnnnnnnnnnnnnnnnnnnnnnnnnnnnnnnnnnnnnnnnnnnnnnnnnnnnnnnnnnnnnnnnnnnnnnnnnnnnnnnnnnnnnnnnnnnnnnnnnnnnnnnnnnnnnnnnnnnnnnnnnnnnnnnnnnnnnnnnnnnnnnnnnnnnnnnnnnnnnnnnnnnnnnnnnnnnnnnnnnnnnnnnnnnnnnnnnnnnnnnnnnnnnnnnnnnnnnnnnnnnnnnnnnnnnnnnnnnnnnnnnnnnnnnnnnnnnnnnnnnnnnnnnnnnnnnnnnnnnnnnnnnnnnnnnnnnnnnnnnnnnnnnnnnnnnnnnnnnnnnnnnnnnnnnnnnnnnnnnnnnnnnnnnnnnnnnnnnnnnnnnnnnnnnnnnnnnnnnnnnnnnnnnnnnnnnnnnnnnnnnnnnnnnnnnnnnnnnnnnnnnnnnnnnnnnnnnnnnnnnnnnnnnnnnnnnnnnnnnnnnnnnnnnnnnnnnnnnnnnnnnnnnnnnnnnnnnnnnnnnnnnnnnnnnnnnnnnnnnnnnnnnnnnnnnnnnnnnnnnnnnnnnnnnnnnnnnnnnnnnnnnnnnnnnnnnnnnnnnnnnnnnnnnnnnnnnnnnnnnnnnnnnnnnnnnnnnnnnnnnnnnnnnnnnnnnnnnnnnnnnnnnnnnnnnnnnnnnnnnnnnnnnnnnnnnnnnnnnnnnnnnnnnnnnnnnnnnnnnnnnnnnnnnnnnnnnnnnnnnnnnnnnnnnnnnnnnnnnnnnnnnnnnnnnnnnnnnnnnnnnnnnnnnnnnnnnnnnnnnnnnnnnnnnnnnnnnnnnnnnnnnnnnnnnnnnnnnnnnnnnnnnnnnnnnnnnnnnnnnnnnnnnnnnnnnnnnnnnnnnnnnnnnnnnnnnnnnnnnnnnnnnnnnnnnnnnnnnnnnnnnnnnnnnnnnnnnnnnnnnnnnnnnnnnnnnnnnnnnnnnnnnnnnnnnnnnnnnnnnnnnnnnnnnnnnnnnnnnnnnnnnnnnnnnnnnnnnnnnnnnnnnnnnnnnnnnnnnnnnnnnnnnnnnnnnnnnnnnnnnnnnnnnnnnnnnnnnnnnnnnnnnnnnnnnnnnnnnnnnnnnnnnnnnnnnnnnnnnnnnnnnnnnnnnnnnnnnnnnnnnnnnnnnnnnnnnnnnnnnnnnnnnnnnnnnnnnnnnnnnnnnnnnnnnnnnnnnnnnnnnnnnnnnnnnnnnnnnnnnnnnnnnnnnnnnnnnnnnnnnnnnnnnnnnnnnnnnnnnnnnnnnnnnnnnnnnnnnnnnnnnnnnnnnnnnnnnnnnnnnnnnnnnnnnnnnnnnnnnnnnnnnnnnnnnnnnnnnnnnnnnnnnnnnnnnnnnnnnnnnnnnnnnnnnnnnnnnnnnnnnnnnnnnnnnnnnnnnnnnnnnnnnnnnnnnnnnnnnnnnnnnnnnnnnnnnnnnnnnnnnnnnnnnnnnnnnnnnnnnnnnnnnnnnnnnnnnnnnnnnnnnnnnnnnnnnnnnnnnnnnnnnnnnnnnnnnnnnnnnnnnnnnnnnnnnnnnnnnnnnnnnnnnnnnnnnnnnnnnnnnnnnnnnnnnnnnnnnnnnnnnnnnnnnnnnnnnnnnnnnnnnnnnnnnnnnnnnnnnnnnnnnnnnnnnnnnnnnnnnnnnnnnnnnnnnnnnnnnnnnnnnnnnnnnnnnnnnnnnnnnnnnnnnnnnnnnnnnnnnnnnnnnnnnnnnnnnnnnnnnnnnnnnnnnnnnnnnnnnnnnnnnnnnnnnnnnnnnnnnnnnnnnnnnnnnnnnnnnnnnnnnnnnnnnnnnnnnnnnnnnnnnnnnnnnnnnnnnnnnnnnnnnnnnnnnnnnnnnnnnnnnnnnnnnnnnnnnnnnnnnnnnnnnnnnnnnnnnnnnnnnnnnnnnnnnnnnnnnnnnnnnnnnnnnnnnnnnnnnnnnnnnnnnnnnnnnnnnnnnnnnnnnnnnnnnnnnnnnnnnnnnnnnnnnnnnnnnnnnnnnnnnnnnnnnnnnnnnnnnnnnnnnnnnnnnnnnnnnnnnnnnnnnnnnnnnnnnnnnnnnnnnnnnnnnnnnnnnnnnnnnnnnnnnnnnnnnnnnnnnnnnnnnnnnnnnnnnnnnnnnnnnnnnnnnnnnnnnnnnnnnnnnnnnnnnnnnnnnnnnnnnnnnnnnnnnnnnnnnnnnnnnnnnnnnnnnnnnnnnnnnnnnnnnnnnnnnnnnnnnnnnnnnnnnnnnnnnnnnnnnnnnnnnnnnnnnnnnnnnnnnnnnnnnnnnnnnnnnnnnnnnnnnnnnnnnnnnnnnnnnnnnnnnnnnnnnnnnnnnnnnnnnnnnnnnnnnnnnnnnnnnnnnnnnnnnnnnnnnnnnnnnnnnnnnnnnnnnnnnnnnnnnnnnnnnnnnnnnnnnnnnnnnnnnnnnnnnnnnnnnnnnnnnnnnnnnnnnnnnnnnnnnnnnnnnnnnnnnnnnnnnnnnnnnnnnnnnnnnnnnnnnnnnnnnnnnnnnnnnnnnnnnnnnnnnnnnnnnnnnnnnnnnnnnnnnnnnnnnnnnnnnnnnnnnnnnnnnnnnnnnnnnnnnnnnnnnnnnnnnnnnnnnnnnnnnnnnnnnnnnnnnnnnnnnnnnnnnnnnnnnnnnnnnnnnnnnnnnnnnnnnnnnnnnnnnnnnnnnnnnnnnnnnnnnnnnnnnnnnnnnnnnnnnnnnnnnnnnnnnnnnnnnnnnnnnnnnnnnnnnnnnnnnnnnnnnnnnnnnnnnnnnnnnnnnnnnnnnnnnnnnnnnnnnnnnnnnnnnnnnnnnnnnnnnnnnnnnnnnnnnnnnnnnnnnnnnnnnnnnnnnnnnnnnnnnnnnnnnnnnnnnnnnnnnnnnnnnnnnnnnnnnnnnnnnnnnnnnnnnnnnnnnnnnnnnnnnnnnnnnnnnnnnnnnnnnnnnnnnnnnnnnnnnnnnnnnnnnnnnnnnnnnnnnnnnnnnnnnnnnnnnnnnnnnnnnnnnnnnnnnnnnnnnnnnnnnnnnnnnnnnnnnnnnnnnnnnnnnnnnnnnnnnnnnnnnnnnnnnnnnnnnnnnnnnnnnnnnnnnnnnnnnnnnnnnnnnnnnnnnnnnnnnnnnnnnnnnnnnnnnnnnnnnnnnnnnnnnnnnnnnnnnnnnnnnnnnnnnnnnnnnnnnnnnnnnnnnnnnnnnnnnnnnnnnnnnnnnnnnnnnnnnnnnnnnnnnnnnnnnnnnnnnnnnnnnnnnnnnnnnnnnnnnnnnnnnnnnnnnnnnnnnnnnnnnnnnnnnnnnnnnnnnnnnnnnnnnnnnnnnnnnnnnnnnnnnnnnnnnnnnnnnnnnnnnnnnnnnnnnnnnnnnnnnnnnnnnnnnnnnnnnnnnnnnnnnnnnnnnnnnnnnnnnnnnnnnnnnnnnnnnnnnnnnnnnnnnnnnnnnnnnnnnnnnnnnnnnnnnnnnnnnnnnnnnnnnnnnnnnnnnnnnnnnnnnnnnnnnnnnnnnnnnnnnnnnnnnnnnnnnnnnnnnnnnnnnnnnnnnnnnnnnnnnnnnnnnnnnnnnnnnnnnnnnnnnnnnnnnnnnnnnnnnnnnnnnnnnnnnnnnnnnnnnnnnnnnnnnnnnnnnnnnnnnnnnnnnnnnnnnnnnnnnnnnnnnnnnnnnnnnnnnnnnnnnnnnnnnnnnnnnnnnnnnnnnnnnnnnnnnnnnnnnnnnnnnnnnnnnnnnnnnnnnnnnnnnnnnnnnnnnnnnnnnnnnnnnnnnnnnnnnnnnnnnnnnnnnnnnnnnnnnnnnnnnnnnnnnnnnnnnnnnnnnnnnnnnnnnnnnnnnnnnnnnnnnnnnnnnnnnnnnnnnnnnnnnnnnnnnnnnnnnnnnnnnnnnnnnnnnnnnnnnnnnnnnnnnnnnnnnnnnnnnnnnnnnnnnnnnnnnnnnnnnnnnnnnnnnnnnnnnnnnnnnnnnnnnnnnnnnnnnnnnnnnnnnnnnnnnnnnnnnnnnnnnnnnnnnnnnnnnnnnnnnnnnnnnnnnnnnnnnnnnnnnnnnnnnnnnnnnnnnnnnnnnnnnnnnnnnnnnnnnnnnnnnnnnnnnnnnnnnnnnnnnnnnnnnnnnnnnnnnnnnnnnnnnnnnnnnnnnnnnnnnnnnnnnnnnnnnnnnnnnnnnnnnnnnnnnnnnnnnnnnnnnnnnnnnnnnnnnnnnnnnnnnnnnnnnnnnnnnnnnnnnnnnnnnnnnnnnnnnnnnnnnnnnnnnnnnnnnnnnnnnnnnnnnnnnnnnnnnnnnnnnnnnnnnnnnnnnnnnnnnnnnnnnnnnnnnnnnnnnnnnnnnnnnnnnnnnnnnnnnnnnnnnnnnnnnnnnnnnnnnnnnnnnnnnnnnnnnnnnnnnnnnnnnnnnnnnnnnnnnnnnnnnnnnnnnnnnnnnnnnnnnnnnnnnnnnnnnnnnnnnnnnnnnnnnnnnnnnnnnnnnnnnnnnnnnnnnnnnnnnnnnnnnnnnnnnnnnnnnnnnnnnnnnnnnnnnnnnnnnnnnnnnnnnnnnnnnnnnnnnnnnnnnnnnnnnnnnnnnnnnnnnnnnnnnnnnnnnnnnnnnnnnnnnnnnnnnnnnnnnnnnnnnnnnnnnnnnnnnnnnnnnnnnnnnnnnnnnnnnnnnnnnnnnnnnnnnnnnnnnnnnnnnnnnnnnnnnnnnnnnnnnnnnnnnnnnnnnnnnnnnnnnnnnnnnnnnnnnnnnnnnnnnnnnnnnnnnnnnnnnnnnnnnnnnnnnnnnnnnnnnnnnnnnnnnnnnnnnnnnnnnnnnnnnnnnnnnnnnnnnnnnnnnnnnnnnnnnnnnnnnnnnnnnnnnnnnnnnnnnnnnnnnnnnnnnnnnnnnnnnnnnnnnnnnnnnnnnnnnnnnnnnnnnnnnnnnnnnnnnnnnnnnnnnnnnnnnnnnnnnnnnnnnnnnnnnnnnnnnnnnnnnnnnnnnnnnnnnnnnnnnnnnnnnnnnnnnnnnnnnnnnnnnnnnnnnnnnnnnnnnnnnnnnnnnnnnnnnnnnnnnnnnnnnnnnnnnnnnnnnnnnnnnnnnnnnnnnnnnnnnnnnnnnnnnnnnnnnnnnnnnnnnnnnnnnnnnnnnnnnnnnnnnnnnnnnnnnnnnnnnnnnnnnnnnnnnnnnnnnnnnnnnnnnnnnnnnnnnnnnnnnnnnnnnnnnnnnnnnnnnnnnnnnnnnnnnnnnnnnnnnnnnnnnnnnnnnnnnnnnnnnnnnnnnnnnnnnnnnnnnnnnnnnnnnnnnnnnnnnnnnnnnnnnnnnnnnnnnnnnnnnnnnnnnnnnnnnnnnnnnnnnnnnnnnnnnnnnnnnnnnnnnnnnnnnnnnnnnnnnnnnnnnnnnnnnnnnnnnnnnnnnnnnnnnnnnnnnnnnnnnnnnnnnnnnnnnnnnnnnnnnnnnnnnnnnnnnnnnnnnnnnnnnnnnnnnnnnnnnnnnnnnnnnnnnnnnnnnnnnnnnnnnnnnnnnnnnnnnnnnnnnnnnnnnnnnnnnnnnnnnnnnnnnnnnnnnnnnnnnnnnnnnnnnnnnnnnnnnnnnnnnnnnnnnnnnnnnnnnnnnnnnnnnnnnnnnnnnnnnnnnnnnnnnnnnnnnnnnnnnnnnnnnnnnnnnnnnnnnnnnnnnnnnnnnnnnnnnnnnnnnnnnnnnnnnnnnnnnnnnnnnnnnnnnnnnnnnnnnnnnnnnnnnnnnnnnnnnnnnnnnnnnnnnnnnnnnnnnnnnnnnnnnnnnnnnnnnnnnnnnnnnnnnnnnnnnnnnnnnnnnnnnnnnnnnnnnnnnnnnnnnnnnnnnnnnnnnnnnnnnnnnnnnnnnnnnnnnnnnnnnnnnnnnnnnnnnnnnnnnnnnnnnnnnnnnnnnnnnnnnnnnnnnnnnnnnnnnnnnnnnnnnnnnnnnnnnnnnnnnnnnnnnnnnnnnnnnnnnnnnnnnnnnnnnnnnnnnnnnnnnnnnnnnnnnnnnnnnnnnnnnnnnnnnnnnnnnnnnnnnnnnnnnnnnnnnnnnnnnnnnnnnnnnnnnnnnnnnnnnnnnnnnnnnnnnnnnnnnnnnnnnnnnnnnnnnnnnnnnnnnnnnnnnnnnnnnnnnnnnnnnnnnnnnnnnnnnnnnnnnnnnnnnnnnnnnnnnnnnnnnnnnnnnnnnnnnnnnnnnnnnnnnnnnnnnnnnnnnnnnnnnnnnnnnnnnnnnnnnnnnnnnnnnnnnnnnnnnnnnnnnnnnnnnnnnnnnnnnnnnnnnnnnnnnnnnnnnnnnnnnnnnnnnnnnnnnnnnnnnnnnnnnnnnnnnnnnnnnnnnnnnnnnnnnnnnnnnnnnnnnnnnnnnnnnnnnnnnnnnnnnnnnnnnnnnnnnnnnnnnnnnnnnnnnnnnnnnnnnnnnnnnnnnnnnnnnnnnnnnnnnnnnnnnnnnnnnnnnnnnnnnnnnnnnnnnnnnnnnnnnnnnnnnnnnnnnnnnnnnnnnnnnnnnnnnnnnnnnnnnnnnnnnnnnnnnnnnnnnnnnnnnnnnnnnnnnnnnnnnnnnnnnnnnnnnnnnnnnnnnnnnnnnnnnnnnnnnnnnnnnnnnnnnnnnnnnnnnnnnnnnnnnnnnnnnnnnnnnnnnnnnnnnnnnnnnnnnnnnnnnnnnnnnnnnnnnnnnnnnnnnnnnnnnnnnnnnnnnnnnnnnnnnnnnnnnnnnnnnnnnnnnnnnnnnnnnnnnnnnnnnnnnnnnnnnnnnnnnnnnnnnnnnnnnnnnnnnnnnnnnnnnnnnnnnnnnnnnnnnnnnnnnnnnnnnnnnnnnnnnnnnnnnnnnnnnnnnnnnnnnnnnnnnnnnnnnnnnnnnnnnnnnnnnnnnnnnnnnnnnnnnnnnnnnnnnnnnnnnnnnnnnnnnnnnnnnnnnnnnnnnnnnnnnnnnnnnnnnnnnnnnnnnnnnnnnnnnnnnnnnnnnnnnnnnnnnnnnnnnnnnnnnnnnnnnnnnnnnnnnnnnnnnnnnnnnnnnnnnnnnnnnnnnnnnnnnnnnnnnnnnnnnnnnnnnnnnnnnnnnnnnnnnnnnnnnnnnnnnnnnnnnnnnnnnnnnnnnnnnnnnnnnnnnnnnnnnnnnnnnnnnnnnnnnnnnnnnnnnnnnnnnnnnnnnnnnnnnnnnnnnnnnnnnnnnnnnnnnnnnnnnnnnnnnnnnnnnnnnnnnnnnnnnnnnnnnnnnnnnnnnnnnnnnnnnnnnnnnnnnnnnnnnnnnnnnnnnnnnnnnnnnnnnnnnnnnnnnnnnnnnnnnnnnnnnnnnnnnnnnnnnnnnnnnnnnnnnnnnnnnnnnnnnnnnnnnnnnnnnnnnnnnnnnnnnnnnnnnnnnnnnnnnnnnnnnnnnnnnnnnnnnnnnnnnnnnnnnnnnnnnnnnnnnnnnnnnnnnnnnnnnnnnnnnnnnnnnnnnnnnnnnnnnnnnnnnnnnnnnnnnnnnnnnnnnnnnnnnnnnnnnnnnnnnnnnnnnnnnnnnnnnnnnnnnnnnnnnnnnnnnnnnnnnnnnnnnnnnnnnnnnnnnnnnnnnnnnnnnnnnnnnnnnnnnnnnnnnnnnnnnnnnnnnnnnnnnnnnnnnnnnnnnnnnnnnnnnnnnnnnnnnnnnnnnnnnnnnnnnnnnnnnnnnnnnnnnnnnnnnnnnnnnnnnnnnnnnnnnnnnnnnnnnnnnnnnnnnnnnnnnnnnnnnnnnnnnnnnnnnnnnnnnnnnnnnnnnnnnnnnnnnnnnnnnnnnnnnnnnnnnnnnnnnnnnnnnnnnnnnnnnnnnnnnnnnnnnnnnnnnnnnnnnnnnnnnnnnnnnnnnnnnnnnnnnnnnnnnnnnnnnnnnnnnnnnnnnnnnnnnnnnnnnnnnnnnnnnnnnnnnnnnnnnnnnnnnnnnnnnnnnnnnnnnnnnnnnnnnnnnnnnnnnnnnnnnnnnnnnnnnnnnnnnnnnnnnnnnnnnnnnnnnnnnnnnnnnnnnnnnnnnnnnnnnnnnnnnnnnnnnnnnnnnnnnnnnnnnnnnnnnnnnnnnnnnnnnnnnnnnnnnnnnnnnnnnnnnnnnnnnnnnnnnnnnnnnnnnnnnnnnnnnnnnnnnnnnnnnnnnnnnnnnnnnnnnnnnnnnnnnnnnnnnnnnnnnnnnnnnnnnnnnnnnnnnnnnnnnnnnnnnnnnnnnnnnnnnnnnnnnnnnnnnnnnnnnnnnnnnnnnnnnnnnnnnnnnnnnnnnnnnnnnnnnnnnnnnnnnnnnnnnnnnnnnnnnnnnnnnnnnnnnnnnnnnnnnnnnnnnnnnnnnnnnnnnnnnnnnnnnnnnnnnnnnnnnnnnnnnnnnnnnnnnnnnnnnnnnnnnnnnnnnnnnnnnnnnnnnnnnnnnnnnnnnnnnnnnnnnnnnnnnnnnnnnnnnnnnnnnnnnnnnnnnnnnnnnnnnnnnnnnnnnnnnnnnnnnnnnnnnnnnnnnnnnnnnnnnnnnnnnnnnnnnnnnnnnnnnnnnnnnnnnnnnnnnnnnnnnnnnnnnnnnnnnnnnnnnnnnnnnnnnnnnnnnnnnnnnnnnnnnnnnnnnnnnnnnnnnnnnnnnnnnnnnnnnnnnnnnnnnnnnnnnnnnnnnnnnnnnnnnnnnnnnnnnnnnnnnnnnnnnnnnnnnnnnnnnnnnnnnnnnnnnnnnnnnnnnnnnnnnnnnnnnnnnnnnnnnnnnnnnnnnnnnnnnnnnnnnnnnnnnnnnnnnnnnnnnnnnnnnnnnnnnnnnnnnnnnnnnnnnnnnnnnnnnnnnnnnnnnnnnnnnnnnnnnnnnnnnnnnnnnnnnnnnnnnnnnnnnnnnnnnnnnnnnnnnnnnnnnnnnnnnnnnnnnnnnnnnnnnnnnnnnnnnnnnnnnnnnnnnnnnnnnnnnnnnnnnnnnnnnnnnnnnnnnnnnnnnnnnnnnnnnnnnnnnnnnnnnnnnnnnnnnnnnnnnnnnnnnnnnnnnnnnnnnnnnnnnnnnnnnnnnnnnnnnnnnnnnnnnnnnnnnnnnnnnnnnnnnnnnnnnnnnnnnnnnnnnnnnnnnnnnnnnnnnnnnnnnnnnnnnnnnnnnnnnnnnnnnnnnnnnnnnnnnnnnnnnnnnnnnnnnnnnnnnnnnnnnnnnnnnnnnnnnnnnnnnnnnnnnnnnnnnnnnnnnnnnnnnnnnnnnnnnnnnnnnnnnnnnnnnnnnnnnnnnnnnnnnnnnnnnnnnnnnnnnnnnnnnnnnnnnnnnnnnnnnnnnnnnnnnnnnnnnnnnnnnnnnnnnnnnnnnnnnnnnnnnnnnnnnnnnnnnnnnnnnnnnnnnnnnnnnnnnnnnnnnnnnnnnnnnnnnnnnnnnnnnnnnnnnnnnnnnnnnnnnnnnnnnnnnnnnnnnnnnnnnnnnnnnnnnnnnnnnnnnnnnnnnnnnnnnnnnnnnnnnnnnnnnnnnnnnnnnnnnnnnnnnnnnnnnnnnnnnnnnnnnnnnnnnnnnnnnnnnnnnnnnnnnnnnnnnnnnnnnnnnnnnnnnnnnnnnnnnnnnnnnnnnnnnnnnnnnnnnnnnnnnnnnnnnnnnnnnnnnnnnnnnnnnnnnnnnnnnnnnnnnnnnnnnnnnnnnnnnnnnnnnnnnnnnnnnnnnnnnnnnnnnnnnnnnnnnnnnnnnnnnnnnnnnnnnnnnnnnnnnnnnnnnnnnnnnnnnnnnnnnnnnnnnnnnnnnnnnnnnnnnnnnnnnnnnnnnnnnnnnnnnnnnnnnnnnnnnnnnnnnnnnnnnnnnnnnnnnnnnnnnnnnnnnnnnnnnnnnnnnnnnnnnnnnnnnnnnnnnnnnnnnnnnnnnnnnnnnnnnnnnnnnnnnnnnnnnnnnnnnnnnnnnnnnnnnnnnnnnnnnnnnnnnnnnnnnnnnnnnnnnnnnnnnnnnnnnnnnnnnnnnnnnnnnnnnnnnnnnnnnnnnnnnnnnnnnnnnnnnnnnnnnnnnnnnnnnnnnnnnnnnnnnnnnnnnnnnnnnnnnnnnnnnnnnnnnnnnnnnnnnnnnnnnnnnnnnnnnnnnnnnnnnnnnnnnnnnnnnnnnnnnnnnnnnnnnnnnnnnnnnnnnnnnnnnnnnnnnnnnnnnnnnnnnnnnnnnnnnnnnnnnnnnnnnnnnnnnnnnnnnnnnnnnnnnnnnnnnnnnnnnnnnnnnnnnnnnnnnnnnnnnnnnnnnnnnnnnnnnnnnnnnnnnnnnnnnnnnnnnnnnnnnnnnnnnnnnnnnnnnnnnnnnnnnnnnnnnnnnnnnnnnnnnnnnnnnnnnnnnnnnnnnnnnnnnnnnnnnnnnnnnnnnnnnnnnnnnnnnnnnnnnnnnnnnnnnnnnnnnnnnnnnnnnnnnnnnnnnnnnnnnnnnnnnnnnnnnnnnnnnnnnnnnnnnnnnnnnnnnnnnnnnnnnnnnnnnnnnnnnnnnnnnnnnnnnnnnnnnnnnnnnnnnnnnnnnnnnnnnnnnnnnnnnnnnnnnnnnnnnnnnnnnnnnnnnnnnnnnnnnnnnnnnnnnnnnnnnnnnnnnnnnnnnnnnnnnnnnnnnnnnnnnnnnnnnnnnnnnnnnnnnnnnnnnnnnnnnnnnnnnnnnnnnnnnnnnnnnnnnnnnnnnnnnnnnnnnnnnnnnnnnnnnnnnnnnnnnnnnnnnnnnnnnnnnnnnnnnnnnnnnnnnnnnnnnnnnnnnnnnnnnnnnnnnnnnnnnnnnnnnnnnnnnnnnnnnnnnnnnnnnnnnnnnnnnnnnnnnnnnnnnnnnnnnnnnnnnnnnnnnnnnnnnnnnnnnnnnnnnnnnnnnnnnnnnnnnnnnnnnnnnnnnnnnnnnnnnnnnnnnnnnnnnnnnnnnnnnnnnnnnnnnnnnnnnnnnnnnnnnnnnnnnnnnnnnnnnnnnnnnnnnnnnnnnnnnnnnnnnnnnnnnnnnnnnnnnnnnnnnnnnnnnnnnnnnnnnnnnnnnnnnnnnnnnnnnnnnnnnnnnnnnnnnnnnnnnnnnnnnnnnnnnnnnnnnnnnnnnnnnnnnnnnnnnnnnnnnnnnnnnnnnnnnnnnnnnnnnnnnnnnnnnnnnnnnnnnnnnnnnnnnnnnnnnnnnnnnnnnnnnnnnnnnnnnnnnnnnnnnnnnnnnnnnnnnnnnnnnnnnnnnnnnnnnnnnnnnnnnnnnnnnnnnnnnnnnnnnnnnnnnnnnnnnnnnnnnnnnnnnnnnnnnnnnnnnnnnnnnnnnnnnnnnnnnnnnnnnnnnnnnnnnnnnnnnnnnnnnnnnnnnnnnnnnnnnnnnnnnnnnnnnnnnnnnnnnnnnnnnnnnnnnnnnnnnnnnnnnnnnnnnnnnnnnnnnnnnnnnnnnnnnnnnnnnnnnnnnnnnnnnnnnnnnnnnnnnnnnnnnnnnnnnnnnnnnnnnnnnnnnnnnnnnnnnnnnnnnnnnnnnnnnnnnnnnnnnnnnnnnnnnnnnnnnnnnnnnnnnnnnnnnnnnnnnnnnnnnnnnnnnnnnnnnnnnnnnnnnnnnnnnnnnnnnnnnnnnnnnnnnnnnnnnnnnnnnnnnnnnnnnnnnnnnnnnnnnnnnnnnnnnnnnnnnnnnnnnnnnnnnnnnnnnnnnnnnnnnnnnnnnnnnnnnnnnnnnnnnnnnnnnnnnnnnnnnnnnnnnnnnnnnnnnnnnnnnnnnnnnnnnnnnnnnnnnnnnnnnnnnnnnnnnnnnnnnnnnnnnnnnnnnnnnnnnnnnnnnnnnnnnnnnnnnnnnnnnnnnnnnnnnnnnnnnnnnnnnnnnnnnnnnnnnnnnnnnnnnnnnnnnnnnnnnnnnnnnnnnnnnnnnnnnnnnnnnnnnnnnnnnnnnnnnnnnnnnnnnnnnnnnnnnnnnnnnnnnnnnnnnnnnnnnnnnnnnnnnnnnnnnnnnnnnnnnnnnnnnnnnnnnnnnnnnnnnnnnnnnnnnnnnnnnnnnnnnnnnnnnnnnnnnnnnnnnnnnnnnnnnnnnnnnnnnnnnnnnnnnnnnnnnnnnnnnnnnnnnnnnnnnnnnnnnnnnnnnnnnnnnnnnnnnnnnnnnnnnnnnnnnnnnnnnnnnnnnnnnnnnnnnnnnnnnnnnnnnnnnnnnnnnnnnnnnnnnnnnnnnnnnnnnnnnnnnnnnnnnnnnnnnnnnnnnnnnnnnnnnnnnnnnnnnnnnnnnnnnnnnnnnnnnnnnnnnnnnnnnnnnnnnnnnnnnnnnnnnnnnnnnnnnnnnnnnnnnnnnnnnnnnnnnnnnnnnnnnnnnnnnnnnnnnnnnnnnnnnnnnnnnnnnnnnnnnnnnnnnnnnnnnnnnnnnnnnnnnnnnnnnnnnnnnnnnnnnnnnnnnnnnnnnnnnnnnnnnnnnnnnnnnnnnnnnnnnnnnnnnnnnnnnnnnnnnnnnnnnnnnnnnnnnnnnnnnnnnnnnnnnnnnnnnnnnnnnnnnnnnnnnnnnnnnnnnnnnnnnnnnnnnnnnnnnnnnnnnnnnnnnnnnnnnnnnnnnnnnnnnnnnnnnnnnnnnnnnnnnnnnnnnnnnnnnnnnnnnnnnnnnnnnnnnnnnnnnnnnnnnnnnnnnnnnnnnnnnnnnnnnnnnnnnnnnnnnnnnnnnnnnnnnnnnnnnnnnnnnnnnnnnnnnnnnnnnnnnnnnnnnnnnnnnnnnnnnnnnnnnnnnnnnnnnnnnnnnnnnnnnnnnnnnnnnnnnnnnnnnnnnnnnnnnnnnnnnnnnnnnnnnnnnnnnnnnnnnnnnnnnnnnnnnnnnnnnnnnnnnnnnnnnnnnnnnnnnnnnnnnnnnnnnnnnnnnnnnnnnnnnnnnnnnnnnnnnnnnnnnnnnnnnnnnnnnnnnnnnnnnnnnnnnnnnnnnnnnnnnnnnnnnnnnnnnnnnnnnnnnnnnnnnnnnnnnnnnnnnnnnnnnnnnnnnnnnnnnnnnnnnnnnnnnnnnnnnnnnnnnnnnnnnnnnnnnnnnnnnnnnnnnnnnnnnnnnnnnnnnnnnnnnnnnnnnnnnnnnnnnnnnnnnnnnnnnnnnnnnnnnnnnnnnnnnnnnnnnnnnnnnnnnnnnnnnnnnnnnnnnnnnnnnnnnnnnnnnnnnnnnnnnnnnnnnnnnnnnnnnnnnnnnnnnnnnnnnnnnnnnnnnnnnnnnnnnnnnnnnnnnnnnnnnnnnnnnnnnnnnnnnnnnnnnnnnnnnnnnnnnnnnnnnnnnnnnnnnnnnnnnnnnnnnnnnnnnnnnnnnnnnnnnnnnnnnnnnnnnnnnnnnnnnnnnnnnnnnnnnnnnnnnnnnnnnnnnnnnnnnnnnnnnnnnnnnnnnnnnnnnnnnnnnnnnnnnnnnnnnnnnnnnnnnnnnnnnnnnnnnnnnnnnnnnnnnnnnnnnnnnnnnnnnnnnnnnnnnnnnnnnnnnnnnnnnnnnnnnnnnnnnnnnnnnnnnnnnnnnnnnnnnnnnnnnnnnnnnnnnnnnnnnnnnnnnnnnnnnnnnnnnnnnnnnnnnnnnnnnnnnnnnnnnnnnnnnnnnnnnnnnnnnnnnnnnnnnnnnnnnnnnnnnnnnnnnnnnnnnnnnnnnnnnnnnnnnnnnnnnnnnnnnnnnnnnnnnnnnnnnnnnnnnnnnnnnnnnnnnnnnnnnnnnnnnnnnnnnnnnnnnnnnnnnnnnnnnnnnnnnnnnnnnnnnnnnnnnnnnnnnnnnnnnnnnnnnnnnnnnnnnnnnnnnnnnnnnnnnnnnnnnnnnnnnnnnnnnnnnnnnnnnnnnnnnnnnnnnnnnnnnnnnnnnnnnnnnnnnnnnnnnnnnnnnnnnnnnnnnnnnnnnnnnnnnnnnnnnnnnnnnnnnnnnnnnnnnnnnnnnnnnnnnnnnnnnnnnnnnnnnnnnnnnnnnnnnnnnnnnnnnnnnnnnnnnnnnnnnnnnnnnnnnnnnnnnnnnnnnnnnnnnnnnnnnnnnnnnnnnnnnnnnnnnnnnnnnnnnnnnnnnnnnnnnnnnnnnnnnnnnnnnnnnnnnnnnnnnnnnnnnnnnnnnnnnnnnnnnnnnnnnnnnnnnnnnnnnnnnnnnnnnnnnnnnnnnnnnnnnnnnnnnnnnnnnnnnnnnnnnnnnnnnnnnnnnnnnnnnnnnnnnnnnnnnnnnnnnnnnnnnnnnnnnnnnnnnnnnnnnnnnnnnnnnnnnnnnnnnnnnnnnnnnnnnnnnnnnnnnnnnnnnnnnnnnnnnnnnnnnnnnnnnnnnnnnnnnnnnnnnnnnnnnnnnnnnnnnnnnnnnnnnnnnnnnnnnnnnnnnnnnnnnnnnnnnnnnnnnnnnnnnnnnnnnnnnnnnnnnnnnnnnnnnnnnnnnnnnnnnnnnnnnnnnnnnnnnnnnnnnnnnnnnnnnnnnnnnnnnnnnnnnnnnnnnnnnnnnnnnnnnnnnnnnnnnnnnnnnnnnnnnnnnnnnnnnnnnnnnnnnnnnnnnnnnnnnnnnnnnnnnnnnnnnnnnnnnnnnnnnnnnnnnnnnnnnnnnnnnnnnnnnnnnnnnnnnnnnnnnnnnnnnnnnnnnnnnnnnnnnnnnnnnnnnnnnnnnnnnnnnnnnnnnnnnnnnnnnnnnnnnnnnnnnnnnnnnnnnnnnnnnnnnnnnnnnnnnnnnnnnnnnnnnnnnnnnnnnnnnnnnnnnnnnnnnnnnnnnnnnnnnnnnnnnnnnnnnnnnnnnnnnnnnnnnnnnnnnnnnnnnnnnnnnnnnnnnnnnnnnnnnnnnnnnnnnnnnnnnnnnnnnnnnnnnnnnnnnnnnnnnnnnnnnnnnnnnnnnnnnnnnnnnnnnnnnnnnnnnnnnnnnnnnnnnnnnnnnnnnnnnnnnnnnnnnnnnnnnnnnnnnnnnnnnnnnnnnnnnnnnnnnnnnnnnnnnnnnnnnnnnnnnnnnnnnnnnnnnnnnnnnnnnnnnnnnnnnnnnnnnnnnnnnnnnnnnnnnnnnnnnnnnnnnnnnnnnnnnnnnnnnnnnnnnnnnnnnnnnnnnnnnnnnnnnnnnnnnnnnnnnnnnnnnnnnnnnnnnnnnnnnnnnnnnnnnnnnnnnnnnnnnnnnnnnnnnnnnnnnnnnnnnnnnnnnnnnnnnnnnnnnnnnnnnnnnnnnnnnnnnnnnnnnnnnnnnnnnnnnnnnnnnnnnnnnnnnnnnnnnnnnnnnnnnnnnnnnnnnnnnnnnnnnnnnnnnnnnnnnnnnnnnnnnnnnnnnnnnnnnnnnnnnnnnnnnnnnnnnnnnnnnnnnnnnnnnnnnnnnnnnnnnnnnnnnnnnnnnnnnnnnnnnnnnnnnnnnnnnnnnnnnnnnnnnnnnnnnnnnnnnnnnnnnnnnnnnnnnnnnnnnnnnnnnnnnnnnnnnnnnnnnnnnnnnnnnnnnnnnnnnnnnnnnnnnnnnnnnnnnnnnnnnnnnnnnnnnnnnnnnnnnnnnnnnnnnnnnnnnnnnnnnnnnnnnnnnnnnnnnnnnnnnnnnnnnnnnnnnnnnnnnnnnnnnnnnnnnnnnnnnnnnnnnnnnnnnnnnnnnnnnnnnnnnnnnnnnnnnnnnnnnnnnnnnnnnnnnnnnnnnnnnnnnnnnnnnnnnnnnnnnnnnnnnnnnnnnnnnnnnnnnnnnnnnnnnnnnnnnnnnnnnnnnnnnnnnnnnnnnnnnnnnnnnnnnnnnnnnnnnnnnnnnnnnnnnnnnnnnnnnnnnnnnnnnnnnnnnnnnnnnnnnnnnnnnnnnnnnnnnnnnnnnnnnnnnnnnnnnnnnnnnnnnnnnnnnnnnnnnnnnnnnnnnnnnnnnnnnnnnnnnnnnnnnnnnnnnnnnnnnnnnnnnnnnnnnnnnnnnnnnnnnnnnnnnnnnnnnnnnnnnnnnnnnnnnnnnnnnnnnnnnnnnnnnnnnnnnnnnnnnnnnnnnnnnnnnnnnnnnnnnnnnnnnnnnnnnnnnnnnnnnnnnnnnnnnnnnnnnnnnnnnnnnnnnnnnnnnnnnnnnnnnnnnnnnnnnnnnnnnnnnnnnnnnnnnnnnnnnnnnnnnnnnnnnnnnnnnnnnnnnnnnnnnnnnnnnnnnnnnnnnnnnnnnnnnnnnnnnnnnnnnnnnnnnnnnnnnnnnnnnnnnnnnnnnnnnnnnnnnnnnnnnnnnnnnnnnnnnnnnnnnnnnnnnnnnnnnnnnnnnnnnnnnnnnnnnnnnnnnnnnnnnnnnnnnnnnnnnnnnnnnnnnnnnnnnnnnnnnnnnnnnnnnnnnnnnnnnnnnnnnnnnnnnnnnnnnnnnnnnnnnnnnnnnnnnnnnnnnnnnnnnnnnnnnnnnnnnnnnnnnnnnnnnnnnnnnnnnnnnnnnnnnnnnnnnnnnnnnnnnnnnnnnnnnnnnnnnnnnnnnnnnnnnnnnnnnnnnnnnnnnnnnnnnnnnnnnnnnnnnnnnnnnnnnnnnnnnnnnnnnnnnnnnnnnnnnnnnnnnnnnnnnnnnnnnnnnnnnnnnnnnnnnnnnnnnnnnnnnnnnnnnnnnnnnnnnnnnnnnnnnnnnnnnnnnnnnnnnnnnnnnnnnnnnnnnnnnnnnnnnnnnnnnnnnnnnnnnnnnnnnnnnnnnnnnnnnnnnnnnnnnnnnnnnnnnnnnnnnnnnnnnnnnnnnnnnnnnnnnnnnnnnnnnnnnnnnnnnnnnnnnnnnnnnnnnnnnnnnnnnnnnnnnnnnnnnnnnnnnnnnnnnnnnnnnnnnnnnnnnnnnnnnnnnnnnnnnnnnnnnnnnnnnnnnnnnnnnnnnnnnnnnnnnnnnnnnnnnnnnnnnnnnnnnnnnnnnnnnnnnnnnnnnnnnnnnnnnnnnnnnnnnnnnnnnnnnnnnnnnnnnnnnnnnnnnnnnnnnnnnnnnnnnnnnnnnnnnnnnnnnnnnnnnnnnnnnnnnnnnnnnnnnnnnnnnnnnnnnnnnnnnnnnnnnnnnnnnnnnnnnnnnnnnnnnnnnnnnnnnnnnnnnnnnnnnnnnnnnnnnnnnnnnnnnnnnnnnnnnnnnnnnnnnnnnnnnnnnnnnnnnnnnnnnnnnnnnnnnnnnnnnnnnnnnnnnnnnnnnnnnnnnnnnnnnnnnnnnnnnnnnnnnnnnnnnnnnnnnnnnnnnnnnnnnnnnnnnnnnnnnnnnnnnnnnnnnnnnnnnnnnnnnnnnnnnnnnnnnnnnnnnnnnnnnnnnnnnnnnnnnnnnnnnnnnnnnnnnnnnnnnnnnnnnnnnnnnnnnnnnnnnnnnnnnnnnnnnnnnnnnnnnnnnnnnnnnnnnnnnnnnnnnnnnnnnnnnnnnnnnnnnnnnnnnnnnnnnnnnnnnnnnnnnnnnnnnnnnnnnnnnnnnnnnnnnnnnnnnnnnnnnnnnnnnnnnnnnnnnnnnnnnnnnnnnnnnnnnnnnnnnnnnnnnnnnnnnnnnnnnnnnnnnnnnnnnnnnnnnnnnnnnnnnnnnnnnnnnnnnnnnnnnnnnnnnnnnnnnnnnnnnnnnnnnnnnnnnnnnnnnnnnnnnnnnnnnnnnnnnnnnnnnnnnnnnnnnnnnnnnnnnnnnnnnnnnnnnnnnnnnnnnnnnnnnnnnnnnnnnnnnnnnnnnnnnnnnnnnnnnnnnnnnnnnnnnnnnnnnnnnnnnnnnnnnnnnnnnnnnnnnnnnnnnnnnnnnnnnnnnnnnnnnnnnnnnnnnnnnnnnnnnnnnnnnnnnnnnnnnnnnnnnnnnnnnnnnnnnnnnnnnnnnnnnnnnnnnnnnnnnnnnnnnnnnnnnnnnnnnnnnnnnnnnnnnnnnnnnnnnnnnnnnnnnnnnnnnnnnnnnnnnnnnnnnnnnnnnnnnnnnnnnnnnnnnnnnnnnnnnnnnnnnnnnnnnnnnnnnnnnnnnnnnnnnnnnnnnnnnnnnnnnnnnnnnnnnnnnnnnnnnnnnnnnnnnnnnnnnnnnnnnnnnnnnnnnnnnnnnnnnnnnnnnnnnnnnnnnnnnnnnnnnnnnnnnnnnnnnnnnnnnnnnnnnnnnnnnnnnnnnnnnnnnnnnnnnnnnnnnnnnnnnnnnnnnnnnnnnnnnnnnnnnnnnnnnnnnnnnnnnnnnnnnnnnnnnnnnnnnnnnnnnnnnnnnnnnnnnnnnnnnnnnnnnnnnnnnnnnnnnnnnnnnnnnnnnnnnnnnnnnnnnnnnnnnnnnnnnnnnnnnnnnnnnnnnnnnnnnnnnnnnnnnnnnnnnnnnnnnnnnnnnnnnnnnnnnnnnnnnnnnnnnnnnnnnnnnnnnnnnnnnnnnnnnnnnnnnnnnnnnnnnnnnnnnnnnnnnnnnnnnnnnnnnnnnnnnnnnnnnnnnnnnnnnnnnnnnnnnnnnnnnnnnnnnnnnnnnnnnnnnnnnnnnnnnnnnnnnnnnnnnnnnnnnnnnnnnnnnnnnnnnnnnnnnnnnnnnnnnnnnnnnnnnnnnnnnnnnnnnnnnnnnnnnnnnnnnnnnnnnnnnnnnnnnnnnnnnnnnnnnnnnnnnnnnnnnnnnnnnnnnnnnnnnnnnnnnnnnnnnnnnnnnnnnnnnnnnnnnnnnnnnnnnnnnnnnnnnnnnnnnnnnnnnnnnnnnnnnnnnnnnnnnnnnnnnnnnnnnnnnnnnnnnnnnnnnnnnnnnnnnnnnnnnnnnnnnnnnnnnnnnnnnnnnnnnnnnnnnnnnnnnnnnnnnnnnnnnnnnnnnnnnnnnnnnnnnnnnnnnnnnnnnnnnnnnnnnnnnnnnnnnnnnnnnnnnnnnnnnnnnnnnnnnnnnnnnnnnnnnnnnnnnnnnnnnnnnnnnnnnnnnnnnnnnnnnnnnnnnnnnnnnnnnnnnnnnnnnnnnnnnnnnnnnnnnnnnnnnnnnnnnnnnnnnnnnnnnnnnnnnnnnnnnnnnnnnnnnnnnnnnnnnnnnnnnnnnnnnnnnnnnnnnnnnnnnnnnnnnnnnnnnnnnnnnnnnnnnnnnnnnnnnnnnnnnnnnnnnnnnnnnnnnnnnnnnnnnnnnnnnnnnnnnnnnnnnnnnnnnnnnnnnnnnnnnnnnnnnnnnnnnnnnnnnnnnnnnnnnnnnnnnnnnnnnnnnnnnnnnnnnnnnnnnnnnnnnnnnnnnnnnnnnnnnnnnnnnnnnnnnnnnnnnnnnnnnnnnnnnnnnnnnnnnnnnnnnnnnnnnnnnnnnnnnnnnnnnnnnnnnnnnnnnnnnnnnnnnnnnnnnnnnnnnnnnnnnnnnnnnnnnnnnnnnnnnnnnnnnnnnnnnnnnnnnnnnnnnnnnnnnnnnnnnnnnnnnnnnnnnnnnnnnnnnnnnnnnnnnnnnnnnnnnnnnnnnnnnnnnnnnnnnnnnnnnnnnnnnnnnnnnnnnnnnnnnnnnnnnnnnnnnnnnnnnnnnnnnnnnnnnnnnnnnnnnnnnnnnnnnnnnnnnnnnnnnnnnnnnnnnnnnnnnnnnnnnnnnnnnnnnnnnnnnnnnnnnnnnnnnnnnnnnnnnnnnnnnnnnnnnnnnnnnnnnnnnnnnnnnnnnnnnnnnnnnnnnnnnnnnnnnnnnnnnnnnnnnnnnnnnnnnntccccgccggaagtgcggtcagaggctaatatatcatagctgtatagctaagacaagaaaatttcttaatttttcgattttcttgattttttcacagcttctttttgtcgggatgtatgcgccacagggacgatatattgttggggtgggttctacgacatgaacatctggagccccaagaagcgagacgagaaattgaatcacaggcgcgacaatcccgtcaaacgagtgctggtcaagcacccgggcgactggccgtggtcgcgctgcggcgggaggttctatttctggaatgatggttcgatcttgagcatggacaagaggctatgaaggtgtcgacatgccgaggggcgcatacatcccgacaaaaacccgtcgggacgtatgcgccacccgcgaaatcgatcgcaagattccctccgaatcggaacgccgcggaggcatcaaagcttctgcgcttagtcaacggcgcgccttgcagcctgtgaagtgtgggctaagcggacgcgataaccgttgtcgtggtcttcgggccttgcctttgccgcgtcccgggtgtataccttcgccatgattgtcctgtggtagctacgcagcggacggtccggtccccccggggcgcgacgggcctgccacccgcctcttgcccaggcaaggaggaagccgtggagtacaacctgctcgaagaaaagtggattcccgttctgtggaaagatgggcacagcggtcgcgtgggcattagtgaggcccttaggcaagcaggccggattcgccaaatcgcggccagcaacccaatggaccgcctggccatcctgcgtttcctgcttgcgttgctctattggtgcaaagggaatcccccggacgacaagaactcgatttcttcgtttccctctgattggttcaagaaactcgatgacaacaaagactgtttcaaccttcagggcgatgggaagcggttttaccaacgcaagcctaaccgacttgagaagaagctgtccgtcaactatctgatgcaagaagtgccgaccggcacaaacttctggcacttccggcatgggacagatttcagaaacggcttatgtccggcatgctgcgcaatgggcttgttgcgccttccgctctttgctacgtcggccgggcgcggcaagcccccgggcgtcaatcaaaaaccgccgatctacatcgtgccgatgggcgactgcctttccgaaaccctgcgcctctcatggcggaagacgtcggagatgaacctgggcacgcccacatgggaaaatccggacataagcctccctcaacacggcaatgttccattattgataggattaacgtgggtaccgcggcgcgtctggttagacactccggagacaccagagtccaactgcatcgcctgcgggcgcagggaggctctgatacgtcaatgtgtctttgcgggtattgggagcacaaagacaggcgaaggcagtctggcacgaatctggaacgacccgcacaccatcagcgaaggcgacgagattgtgaagcctttcagcgcgcttggcccggccgacgctgcggctgggaagtggacgaaggtcgtggcgggaatcctgtgcggggaaaagccgaaggggaacagtaagttgtgggtcgtcagctttgcgacagtgcagaacgacaaatacctggaagcagccgagcgggagattcaattcttggccgcgctcgacgacgtgaaggttcaggcgagtttgcaagaaatccaggcgtggcagaaggaaggctggaagctcgttggcagagccaaaccgcgagagacttcacgaaacagaggacaccttgaaattctctccgcagtcgccgctgttcgtccccaagccgaggcaacggtttccggaaaaatcgacgagatgatcgcagaaggcggtaaggcatgggaagaggcggcccaggaatatcgtccgttgatggccgccgtcgccaaatcgctttccccgggctacacaaccgcttccctccggaggcgacaagaaattgccgctgtaaagccggacatgcggccaaagagaaacaacaaagacgaagggggggacaagtgactccaacggagcagtacgtcgaagttctgactcgactgaaacccggtgagctcgggctcttgcgcaaccatgccgggcaagggctcgacgaatcggtagagggctttgaccttttcgcaggcctttggtggccgctgcgggcgcaaacccaacgggcgcctcgccgtgaggtggcctggcttgtcgccaaactctacgccctccggcccctcgagcattcaccccgcgagaccctcgctcgccagctcgggcgatcccggccgggcgagaaaacagcgcggcagcgtttcgagcaacgcttcgacaggatgctcacgctgccgcttgctgaaatcgaacccgccctacagtgggcaatcgacctcatagcttccaagcacctcgaactcgactgggtgcggctgacgaacgatctttccatctgggaacgcgaatccacccggctcaaatgggccgaggaatttttgaactgtccaagaggaggagagtcatgttgatccagattcacgccattcagaatcacagcccggccaacctgaaccgggatgacctgggcgcgcccaagacttgcttttttggcggagtcttgcgctcccgtatttccagccagtgccttaagcgcagcatccgcatgagtgaggagttcagacaattgctgggcggagttcgcacccgccagttggcgaaagagattgcggaaaaggtgacgggcaaagacgtcaggaagcgagcggagaacattctcaaagcctgcgggctggagcctaagaaagcaaaaaaacaggaaggagaagacgaacaggaaagtgctgagaggagcaagatgctggtttacaccacccaagaggcgattacacgcatggccgaactcctccagcagggcgacggaaaaacggacgaggccttggcagcggagttcggcaagctcatcagtgaatccgtcgccgtgccggacatggcgctgagcggcaggatgcttgaaacgggagtcctcaaagacacgacggttgaggcatcgcttcaagtcgcccatgccatttccacccatgaggcccggcccgaggtggactactatgtcgccgccgatgatgtccccggcgaggacgcgggcgcaggttacgtggatgaagccatgttcggttcggcatgtttctacaagtatttctccattcattgggaaacgctggtcaaaaacctgaagcccttcgggacgaatcacgaaaaactggcggcccataccgtcggcgccttcattcgcgccgcggccttggccaaccccacgggaaaacaaaatagttttgccgcgcacaaccctcctgacgggatgttggtggaagtcagaaacactcccatcagctacgccaacgccttcgccaaaccggcggctcctcagggcgaacgggacatcatctcgcagagcgtggcgcagcttgcccattatgtgaacgacatagatacgggatacggcaagccgacgaagcggttctggttctctccaaatctccgctatccgttgacggctaccaccacggagagcgaagacggaaaacagaaacagcgtgaggtcccgcttgccgacaaagatgttaagtctcttgacgaactgatagcggctgtactcaaggaaatcggttacgactggcaggaggccaagaaagtggtcctgaatccggaggtgccccatgagcgcaaagacgctgctacttcggcttgaaggtcctcttcaggcatggggcgatcagcaatccaagttcgtcattcggcgcacggccgaggcgccgaccaagtccggcgtcatcgggatgctttgcgcggcattgggcgtttcccggccagaggcccgcgaaggctggcttccaaggctggcccggctgcgcatgggcgtacgcgtcgatgcgccaggggtccgctggtgggattatcacacggtgggtgcggggatgccgatgcgtaccgccgaggggggaaccaagtccggagccatgctcacccgccgcgaatacctttgcgacgcctcgtttctcgtcgctcttcagggcgaaccggacctcattgaggaactggaggcggcaatcaaagcgcccaagtggacactctacctcggcagaaagtgctgccccccttgccgccctctgctggagcatccgggaggtgaattccccgacttgctttctgccctcgaatcggtcccctggcgtcggcggctgaaggacgatccccagccgcgacccgtcgattgcctgcttgattgggaacccaccaacgagcagcccgaggcgcccgatgatgcgctcgtctggtacgacgtgccgttgacattcgagccgccgtcgcaccaaccccgattcgtcatccgcaggcagttgcgcgtcggagcggacggcgacgtaacacttgcggtgcagccaccgcagagcgacacgccaccgcctccgcgcccaagagcggattacacgaacacagagtacaaaaaccgacgcaaggagcggctcgacgacgactatcacttgtgcgttttttgcaagtctcccgccagcaccgtgcagcacatcacgtaccgccgcgcgggcggcggcgaactccgggacgatttgcgctccctctgccgcctctgccacgacgccgtgaccatgatcgagtacgggctcggaatgggcttggaccgcatcaaccccgaagagccccgttggcgcgacaagatcatcgagaagcgggaagagattatcaggttccgctctctggagactcgccgcagacgccttgccgctgaggaggtggaatagccatgtacctctcctgcctcttgattgacgtcggcaccaaccccgaccgccccaggcccgggcggctctggctgcgaaacctccatcacgtccaccagcgcctttgcatggcgtttccatccaaagaccgaatatcccacgatccccacttcctcaagcctttcaaacccgcggactttgccaacaaccaggtccatgtaagacgtgacggcgactccggctttctcttccgcatcgacccgcaaccgggcgggcgggtcgtgatcctcgtccagtctaactctgccgtaaagcctgactggggctacgccttccacaacgcccgttttcttctgaatcctctagccgctccccctcaggtgcaggaattcgacccccgctttgagaagggtcagcggcttcgcttccgtatccgcgccaatctgagtaagaagataaaaaccagcacagagggcgttgatcttacgaggacgcgagaggggacagataagcggggccgcccgaaggcccaaggcaaacgcgtggcgctgacctgggacaaggaccagaaccgcgacgatgtgatacgaaaatggttcgccggcaagggcggccaaggtggattccaagtggaaactttccgggtcttgcagatcgggtggggcgcaggagaccgatccgacccgaggccgacgggcggccgcatgaaatttcgctcggcgttattggaggggacgcttacggttgaggacgcggacagcttcagagaaaccatcgtgggcggcgttgggcacggcaaagccttcggcttcggcctgctttccgtggcgccgctctcgctgtagcggcggtctccgaccgccggtacgtcgatcggagatcgacgctacaatcccttgtcgatcggggatccgtgcaacatttcttgagcggagatcgagccaatatgaaattcaaaccccgcttgcggcgactggactggctctatacgggcagcccaatctactatctcacgctgtgtacgcaggaccgcaaacgctcgttggcaaatcctgcgattcaccgggaattcacgagattctccgaacgggcgagcgattttcttgtttgggtcgggttcttcatgatcatgcctgatcacatccatcttttcgccggcttttgtcgtgagtccccacctttagggaaatggatcaaggcgctgcgcggggatttatccaaagtcctccgggaagatgagggcgagggcacacattgggagaaagactttttcgatcacgtcctgagatcgcaagaatcctatcgggagaaatatgaatatgtccggcagaatccggtccgggccggtttagtcaagcgcccggaagattggccgtaccagggtgagatccatcgcctggttttgtagcggcggtctccgaccgccgtaacgtcgatcggagatcgactacaaccccggtcgatcggagatcgacgctacaaccgccgtcgatcggagatcgacgctacagcacgggctggaggctctgtgagaattcaagatctccacgttctacccaagttcagtgacgggtggagttatctgtacgtcgagcattgccacgtcgatcaggaagagcgggccattgccgtccacgatcaagccgggaaggtgccggtcccctgtgccaatctggctctcctgatgttgggtccgggcgtctcgattactcacgccgccatctccgtgttggcggaccatgggtgcctggtggcttggtgcggggaggagggagtccgcttctacgccgtgggcatgggcgagacgcgcaacgcggccaacttcctgcatcaggcgaggctgtgggcggaccagggtttccatatgcaggtggtgcgccgcctctatcagttgcgattttcggagaagttcgaccctgccctgaccctccagcaaatccgcggcatggagggcgtgtgggtgcgcgatgcctacgccaaggccgcccaggaagccggcatcacgtggtcgggccgcagctataaacgcgatgagtggagcaaggcggaccctgccaaccgagccttgtccgccgctaactcctgcctatatggaatctgccatgctgccatcgtgtcagcaggtttttcgcccgcactcgggtttatccacaccggcaagatgctgtccttcgtctacgatctcgccgacctgtacaaggctgaaattaccgttccagtggcatttcgcgccgccgccgaggggacgggacagttggaacgccgggtgcgcatcacctgccgcgatcagttcgtatccacgcggcttctggagagaatcatcccggatgtccaaagggcgttgatgctggcaaaagcgacggcctgggacactaccttcgacctggatgccgccgcccccggcttcctctgggacaatctggaaggagaggtcgaaggcggccgcctgctagcccccgaaatcggtgaaacggagcccggcgatggtggtcctgattcttgagcgcgtccccccagggttgcgaggcgagctgactcgctggtttttggaacctcaggcgggagtgttcgtgggacgcgtctccgccatggtccgtgatcggctctgggaaaaagcctgcagccaggccaagggaggcgggtgcttgattatctattcaagcgacaatgaacagggctttcgagtccgaacctggggccaaacagctcgggtcatcgatgacttcgagggcctttttctcgttcgcatgccgcagaatcaataatttagtaagtgttgtccccacgcgcgtgggggtgaaccgccggggctgaaggtttcatgggctggaaagaagttgtccccacgcgcgtgggggtgaaccgatatgctgcatgtgccggggctggcgcttgatgttgtccccacgcgcgtgggggtgaaccggtatcggcgagtggcaaggcgaatccacttaggttgtccccacgcgcgtgggggtgaaccgacctccgagggcgcggggcgcgtgctggcgatgttgtccccacgcgcgtgggggtgaaccggctggggccgacgcgcgcttgtgagactgcgggttgtccccacgcgcgtgggggtgaaccgcgggagaactttgaaggcacggtcctcgatcacgttgtccccacgcgcgtgggggtgaaccggcgcaggttaaggctgaggccaaggccgatgcgttgtccccacgcgcgtgggggtgaaccgtaatggtggcttgcaccttctgctcgaccgatgttgtccccacgcgcgtgggggtgaaccgcagcgggccgtgttggaggagaaggtcgcggagttgtccccacgcgcgtgggggtgaaccgttcccagccgcaggcaggatcaccgtaccccagttgtccccacgcgcgtgggggtgaaccgcaaaacaatatcaagaccaagcacttggatgtgttgtccccacgcgcgtgggggtgaaccgcatcgggcagcacagcggccttataccccaaagttgtccccacgcgcgtgggggtgaaccggcagctcgcggcgattcgcattgccgctgaaagttgtccccacgcgcgtgggggtgaaccggggagtcgtgagtgtagttacaggcagggttcgttgtccccacgcgcgtgggggtgaaccgcttctgcatcttataaagaacgccagtttgaagttgtccccacgcgcgtgggggtgaaccggtacggttcccaggggaattatttcttggggtgttgtccccacgcgcgtgggggtgaaccgatgtagcttgatatgggtgtggtgtcgcagaagttgtccccacgcgcgtgggggtgaaccggcggcgcgcacattccaacctcgtccgtatccgttgtccccacgcgcgtgggggtgaaccggcggacacggcggatgtgacgaatatggagtcgttgtccccacgcgcgtgggggtgaaccggtctctcgaaaaggaaagccaactttcagcttgttgtccccacgcgcgtgggggtgaaccgctcttggcatagagcttagtgagtttgatgaagttgtccccacgcgcgtgggggtgaaccgcctttgccctccgagacgcaacagctccattcgttgtccccacgcgcgtgggggtgaaccggcgagcgcaggtctaagcgaccgcgacaaagagttgtccccacgcgcgtgggggtgaaccggtgatggacacttcctaaaatggcattaagtcgttgtccccacgcgcgtgggggtgaaccgcagcgggtagcgcagacttcgtgcatatcgaagtctgcggcttttgccgccgtgaatcttgaaaagccgcagacctgcaaaaagcgcaggtctgcgctacccactgcctggccatcctggagaattgaaagtccctccagtaaagcggcgaagcgcaggatttccggctgcttcaatcgcttgcgacgctcaccggtcagtagcgcgttggtaatttcgag

SEQ ID NO: 1068 - DNA, 103671 bp, Artificial Sequence
  Synthetic Oligonucleotide
  misc_feature (1)..(94439): n is a, c, g, or t
nnnnnnnnnnnnnnnnnnnnnnnnnnnnnnnnnnnnnnnnnnnnnnnnnnnnnnnnnnnnnnnnnnnnnnnnnnnnnnnnnnnnnnnnnnnnnnnnnnnnnnnnnnnnnnnnnnnnnnnnnnnnnnnnnnnnnnnnnnnnnnnnnnnnnnnnnnnnnnnnnnnnnnnnnnnnnnnnnnnnnnnnnnnnnnnnnnnnnnnnnnnnnnnnnnnnnnnnnnnnnnnnnnnnnnnnnnnnnnnnnnnnnnnnnnnnnnnnnnnnnnnnnnnnnnnnnnnnnnnnnnnnnnnnnnnnnnnnnnnnnnnnnnnnnnnnnnnnnnnnnnnnnnnnnnnnnnnnnnnnnnnnnnnnnnnnnnnnnnnnnnnnnnnnnnnnnnnnnnnnnnnnnnnnnnnnnnnnnnnnnnnnnnnnnnnnnnnnnnnnnnnnnnnnnnnnnnnnnnnnnnnnnnnnnnnnnnnnnnnnnnnnnnnnnnnnnnnnnnnnnnnnnnnnnnnnnnnnnnnnnnnnnnnnnnnnnnnnnnnnnnnnnnnnnnnnnnnnnnnnnnnnnnnnnnnnnnnnnnnnnnnnnnnnnnnnnnnnnnnnnnnnnnnnnnnnnnnnnnnnnnnnnnnnnnnnnnnnnnnnnnnnnnnnnnnnnnnnnnnnnnnnnnnnnnnnnnnnnnnnnnnnnnnnnnnnnnnnnnnnnnnnnnnnnnnnnnnnnnnnnnnnnnnnnnnnnnnnnnnnnnnnnnnnnnnnnnnnnnnnnnnnnnnnnnnnnnnnnnnnnnnnnnnnnnnnnnnnnnnnnnnnnnnnnnnnnnnnnnnnnnnnnnnnnnnnnnnnnnnnnnnnnnnnnnnnnnnnnnnnnnnnnnnnnnnnnnnnnnnnnnnnnnnnnnnnnnnnnnnnnnnnnnnnnnnnnnnnnnnnnnnnnnnnnnnnnnnnnnnnnnnnnnnnnnnnnnnnnnnnnnnnnnnnnnnnnnnnnnnnnnnnnnnnnnnnnnnnnnnnnnnnnnnnnnnnnnnnnnnnnnnnnnnnnnnnnnnnnnnnnnnnnnnnnnnnnnnnnnnnnnnnnnnnnnnnnnnnnnnnnnnnnnnnnnnnnnnnnnnnnnnnnnnnnnnnnnnnnnnnnnnnnnnnnnnnnnnnnnnnnnnnnnnnnnnnnnnnnnnnnnnnnnnnnnnnnnnnnnnnnnnnnnnnnnnnnnnnnnnnnnnnnnnnnnnnnnnnnnnnnnnnnnnnnnnnnnnnnnnnnnnnnnnnnnnnnnnnnnnnnnnnnnnnnnnnnnnnnnnnnnnnnnnnnnnnnnnnnnnnnnnnnnnnnnnnnnnnnnnnnnnnnnnnnnnnnnnnnnnnnnnnnnnnnnnnnnnnnnnnnnnnnnnnnnnnnnnnnnnnnnnnnnnnnnnnnnnnnnnnnnnnnnnnnnnnnnnnnnnnnnnnnnnnnnnnnnnnnnnnnnnnnnnnnnnnnnnnnnnnnnnnnnnnnnnnnnnnnnnnnnnnnnnnnnnnnnnnnnnnnnnnnnnnnnnnnnnnnnnnnnnnnnnnnnnnnnnnnnnnnnnnnnnnnnnnnnnnnnnnnnnnnnnnnnnnnnnnnnnnnnnnnnnnnnnnnnnnnnnnnnnnnnnnnnnnnnnnnnnnnnnnnnnnnnnnnnnnnnnnnnnnnnnnnnnnnnnnnnnnnnnnnnnnnnnnnnnnnnnnnnnnnnnnnnnnnnnnnnnnnnnnnnnnnnnnnnnnnnnnnnnnnnnnnnnnnnnnnnnnnnnnnnnnnnnnnnnnnnnnnnnnnnnnnnnnnnnnnnnnnnnnnnnnnnnnnnnnnnnnnnnnnnnnnnnnnnnnnnnnnnnnnnnnnnnnnnnnnnnnnnnnnnnnnnnnnnnnnnnnnnnnnnnnnnnnnnnnnnnnnnnnnnnnnnnnnnnnnnnnnnnnnnnnnnnnnnnnnnnnnnnnnnnnnnnnnnnnnnnnnnnnnnnnnnnnnnnnnnnnnnnnnnnnnnnnnnnnnnnnnnnnnnnnnnnnnnnnnnnnnnnnnnnnnnnnnnnnnnnnnnnnnnnnnnnnnnnnnnnnnnnnnnnnnnnnnnnnnnnnnnnnnnnnnnnnnnnnnnnnnnnnnnnnnnnnnnnnnnnnnnnnnnnnnnnnnnnnnnnnnnnnnnnnnnnnnnnnnnnnnnnnnnnnnnnnnnnnnnnnnnnnnnnnnnnnnnnnnnnnnnnnnnnnnnnnnnnnnnnnnnnnnnnnnnnnnnnnnnnnnnnnnnnnnnnnnnnnnnnnnnnnnnnnnnnnnnnnnnnnnnnnnnnnnnnnnnnnnnnnnnnnnnnnnnnnnnnnnnnnnnnnnnnnnnnnnnnnnnnnnnnnnnnnnnnnnnnnnnnnnnnnnnnnnnnnnnnnnnnnnnnnnnnnnnnnnnnnnnnnnnnnnnnnnnnnnnnnnnnnnnnnnnnnnnnnnnnnnnnnnnnnnnnnnnnnnnnnnnnnnnnnnnnnnnnnnnnnnnnnnnnnnnnnnnnnnnnnnnnnnnnnnnnnnnnnnnnnnnnnnnnnnnnnnnnnnnnnnnnnnnnnnnnnnnnnnnnnnnnnnnnnnnnnnnnnnnnnnnnnnnnnnnnnnnnnnnnnnnnnnnnnnnnnnnnnnnnnnnnnnnnnnnnnnnnnnnnnnnnnnnnnnnnnnnnnnnnnnnnnnnnnnnnnnnnnnnnnnnnnnnnnnnnnnnnnnnnnnnnnnnnnnnnnnnnnnnnnnnnnnnnnnnnnnnnnnnnnnnnnnnnnnnnnnnnnnnnnnnnnnnnnnnnnnnnnnnnnnnnnnnnnnnnnnnnnnnnnnnnnnnnnnnnnnnnnnnnnnnnnnnnnnnnnnnnnnnnnnnnnnnnnnnnnnnnnnnnnnnnnnnnnnnnnnnnnnnnnnnnnnnnnnnnnnnnnnnnnnnnnnnnnnnnnnnnnnnnnnnnnnnnnnnnnnnnnnnnnnnnnnnnnnnnnnnnnnnnnnnnnnnnnnnnnnnnnnnnnnnnnnnnnnnnnnnnnnnnnnnnnnnnnnnnnnnnnnnnnnnnnnnnnnnnnnnnnnnnnnnnnnnnnnnnnnnnnnnnnnnnnnnnnnnnnnnnnnnnnnnnnnnnnnnnnnnnnnnnnnnnnnnnnnnnnnnnnnnnnnnnnnnnnnnnnnnnnnnnnnnnnnnnnnnnnnnnnnnnnnnnnnnnnnnnnnnnnnnnnnnnnnnnnnnnnnnnnnnnnnnnnnnnnnnnnnnnnnnnnnnnnnnnnnnnnnnnnnnnnnnnnnnnnnnnnnnnnnnnnnnnnnnnnnnnnnnnnnnnnnnnnnnnnnnnnnnnnnnnnnnnnnnnnnnnnnnnnnnnnnnnnnnnnnnnnnnnnnnnnnnnnnnnnnnnnnnnnnnnnnnnnnnnnnnnnnnnnnnnnnnnnnnnnnnnnnnnnnnnnnnnnnnnnnnnnnnnnnnnnnnnnnnnnnnnnnnnnnnnnnnnnnnnnnnnnnnnnnnnnnnnnnnnnnnnnnnnnnnnnnnnnnnnnnnnnnnnnnnnnnnnnnnnnnnnnnnnnnnnnnnnnnnnnnnnnnnnnnnnnnnnnnnnnnnnnnnnnnnnnnnnnnnnnnnnnnnnnnnnnnnnnnnnnnnnnnnnnnnnnnnnnnnnnnnnnnnnnnnnnnnnnnnnnnnnnnnnnnnnnnnnnnnnnnnnnnnnnnnnnnnnnnnnnnnnnnnnnnnnnnnnnnnnnnnnnnnnnnnnnnnnnnnnnnnnnnnnnnnnnnnnnnnnnnnnnnnnnnnnnnnnnnnnnnnnnnnnnnnnnnnnnnnnnnnnnnnnnnnnnnnnnnnnnnnnnnnnnnnnnnnnnnnnnnnnnnnnnnnnnnnnnnnnnnnnnnnnnnnnnnnnnnnnnnnnnnnnnnnnnnnnnnnnnnnnnnnnnnnnnnnnnnnnnnnnnnnnnnnnnnnnnnnnnnnnnnnnnnnnnnnnnnnnnnnnnnnnnnnnnnnnnnnnnnnnnnnnnnnnnnnnnnnnnnnnnnnnnnnnnnnnnnnnnnnnnnnnnnnnnnnnnnnnnnnnnnnnnnnnnnnnnnnnnnnnnnnnnnnnnnnnnnnnnnnnnnnnnnnnnnnnnnnnnnnnnnnnnnnnnnnnnnnnnnnnnnnnnnnnnnnnnnnnnnnnnnnnnnnnnnnnnnnnnnnnnnnnnnnnnnnnnnnnnnnnnnnnnnnnnnnnnnnnnnnnnnnnnnnnnnnnnnnnnnnnnnnnnnnnnnnnnnnnnnnnnnnnnnnnnnnnnnnnnnnnnnnnnnnnnnnnnnnnnnnnnnnnnnnnnnnnnnnnnnnnnnnnnnnnnnnnnnnnnnnnnnnnnnnnnnnnnnnnnnnnnnnnnnnnnnnnnnnnnnnnnnnnnnnnnnnnnnnnnnnnnnnnnnnnnnnnnnnnnnnnnnnnnnnnnnnnnnnnnnnnnnnnnnnnnnnnnnnnnnnnnnnnnnnnnnnnnnnnnnnnnnnnnnnnnnnnnnnnnnnnnnnnnnnnnnnnnnnnnnnnnnnnnnnnnnnnnnnnnnnnnnnnnnnnnnnnnnnnnnnnnnnnnnnnnnnnnnnnnnnnnnnnnnnnnnnnnnnnnnnnnnnnnnnnnnnnnnnnnnnnnnnnnnnnnnnnnnnnnnnnnnnnnnnnnnnnnnnnnnnnnnnnnnnnnnnnnnnnnnnnnnnnnnnnnnnnnnnnnnnnnnnnnnnnnnnnnnnnnnnnnnnnnnnnnnnnnnnnnnnnnnnnnnnnnnnnnnnnnnnnnnnnnnnnnnnnnnnnnnnnnnnnnnnnnnnnnnnnnnnnnnnnnnnnnnnnnnnnnnnnnnnnnnnnnnnnnnnnnnnnnnnnnnnnnnnnnnnnnnnnnnnnnnnnnnnnnnnnnnnnnnnnnnnnnnnnnnnnnnnnnnnnnnnnnnnnnnnnnnnnnnnnnnnnnnnnnnnnnnnnnnnnnnnnnnnnnnnnnnnnnnnnnnnnnnnnnnnnnnnnnnnnnnnnnnnnnnnnnnnnnnnnnnnnnnnnnnnnnnnnnnnnnnnnnnnnnnnnnnnnnnnnnnnnnnnnnnnnnnnnnnnnnnnnnnnnnnnnnnnnnnnnnnnnnnnnnnnnnnnnnnnnnnnnnnnnnnnnnnnnnnnnnnnnnnnnnnnnnnnnnnnnnnnnnnnnnnnnnnnnnnnnnnnnnnnnnnnnnnnnnnnnnnnnnnnnnnnnnnnnnnnnnnnnnnnnnnnnnnnnnnnnnnnnnnnnnnnnnnnnnnnnnnnnnnnnnnnnnnnnnnnnnnnnnnnnnnnnnnnnnnnnnnnnnnnnnnnnnnnnnnnnnnnnnnnnnnnnnnnnnnnnnnnnnnnnnnnnnnnnnnnnnnnnnnnnnnnnnnnnnnnnnnnnnnnnnnnnnnnnnnnnnnnnnnnnnnnnnnnnnnnnnnnnnnnnnnnnnnnnnnnnnnnnnnnnnnnnnnnnnnnnnnnnnnnnnnnnnnnnnnnnnnnnnnnnnnnnnnnnnnnnnnnnnnnnnnnnnnnnnnnnnnnnnnnnnnnnnnnnnnnnnnnnnnnnnnnnnnnnnnnnnnnnnnnnnnnnnnnnnnnnnnnnnnnnnnnnnnnnnnnnnnnnnnnnnnnnnnnnnnnnnnnnnnnnnnnnnnnnnnnnnnnnnnnnnnnnnnnnnnnnnnnnnnnnnnnnnnnnnnnnnnnnnnnnnnnnnnnnnnnnnnnnnnnnnnnnnnnnnnnnnnnnnnnnnnnnnnnnnnnnnnnnnnnnnnnnnnnnnnnnnnnnnnnnnnnnnnnnnnnnnnnnnnnnnnnnnnnnnnnnnnnnnnnnnnnnnnnnnnnnnnnnnnnnnnnnnnnnnnnnnnnnnnnnnnnnnnnnnnnnnnnnnnnnnnnnnnnnnnnnnnnnnnnnnnnnnnnnnnnnnnnnnnnnnnnnnnnnnnnnnnnnnnnnnnnnnnnnnnnnnnnnnnnnnnnnnnnnnnnnnnnnnnnnnnnnnnnnnnnnnnnnnnnnnnnnnnnnnnnnnnnnnnnnnnnnnnnnnnnnnnnnnnnnnnnnnnnnnnnnnnnnnnnnnnnnnnnnnnnnnnnnnnnnnnnnnnnnnnnnnnnnnnnnnnnnnnnnnnnnnnnnnnnnnnnnnnnnnnnnnnnnnnnnnnnnnnnnnnnnnnnnnnnnnnnnnnnnnnnnnnnnnnnnnnnnnnnnnnnnnnnnnnnnnnnnnnnnnnnnnnnnnnnnnnnnnnnnnnnnnnnnnnnnnnnnnnnnnnnnnnnnnnnnnnnnnnnnnnnnnnnnnnnnnnnnnnnnnnnnnnnnnnnnnnnnnnnnnnnnnnnnnnnnnnnnnnnnnnnnnnnnnnnnnnnnnnnnnnnnnnnnnnnnnnnnnnnnnnnnnnnnnnnnnnnnnnnnnnnnnnnnnnnnnnnnnnnnnnnnnnnnnnnnnnnnnnnnnnnnnnnnnnnnnnnnnnnnnnnnnnnnnnnnnnnnnnnnnnnnnnnnnnnnnnnnnnnnnnnnnnnnnnnnnnnnnnnnnnnnnnnnnnnnnnnnnnnnnnnnnnnnnnnnnnnnnnnnnnnnnnnnnnnnnnnnnnnnnnnnnnnnnnnnnnnnnnnnnnnnnnnnnnnnnnnnnnnnnnnnnnnnnnnnnnnnnnnnnnnnnnnnnnnnnnnnnnnnnnnnnnnnnnnnnnnnnnnnnnnnnnnnnnnnnnnnnnnnnnnnnnnnnnnnnnnnnnnnnnnnnnnnnnnnnnnnnnnnnnnnnnnnnnnnnnnnnnnnnnnnnnnnnnnnnnnnnnnnnnnnnnnnnnnnnnnnnnnnnnnnnnnnnnnnnnnnnnnnnnnnnnnnnnnnnnnnnnnnnnnnnnnnnnnnnnnnnnnnnnnnnnnnnnnnnnnnnnnnnnnnnnnnnnnnnnnnnnnnnnnnnnnnnnnnnnnnnnnnnnnnnnnnnnnnnnnnnnnnnnnnnnnnnnnnnnnnnnnnnnnnnnnnnnnnnnnnnnnnnnnnnnnnnnnnnnnnnnnnnnnnnnnnnnnnnnnnnnnnnnnnnnnnnnnnnnnnnnnnnnnnnnnnnnnnnnnnnnnnnnnnnnnnnnnnnnnnnnnnnnnnnnnnnnnnnnnnnnnnnnnnnnnnnnnnnnnnnnnnnnnnnnnnnnnnnnnnnnnnnnnnnnnnnnnnnnnnnnnnnnnnnnnnnnnnnnnnnnnnnnnnnnnnnnnnnnnnnnnnnnnnnnnnnnnnnnnnnnnnnnnnnnnnnnnnnnnnnnnnnnnnnnnnnnnnnnnnnnnnnnnnnnnnnnnnnnnnnnnnnnnnnnnnnnnnnnnnnnnnnnnnnnnnnnnnnnnnnnnnnnnnnnnnnnnnnnnnnnnnnnnnnnnnnnnnnnnnnnnnnnnnnnnnnnnnnnnnnnnnnnnnnnnnnnnnnnnnnnnnnnnnnnnnnnnnnnnnnnnnnnnnnnnnnnnnnnnnnnnnnnnnnnnnnnnnnnnnnnnnnnnnnnnnnnnnnnnnnnnnnnnnnnnnnnnnnnnnnnnnnnnnnnnnnnnnnnnnnnnnnnnnnnnnnnnnnnnnnnnnnnnnnnnnnnnnnnnnnnnnnnnnnnnnnnnnnnnnnnnnnnnnnnnnnnnnnnnnnnnnnnnnnnnnnnnnnnnnnnnnnnnnnnnnnnnnnnnnnnnnnnnnnnnnnnnnnnnnnnnnnnnnnnnnnnnnnnnnnnnnnnnnnnnnnnnnnnnnnnnnnnnnnnnnnnnnnnnnnnnnnnnnnnnnnnnnnnnnnnnnnnnnnnnnnnnnnnnnnnnnnnnnnnnnnnnnnnnnnnnnnnnnnnnnnnnnnnnnnnnnnnnnnnnnnnnnnnnnnnnnnnnnnnnnnnnnnnnnnnnnnnnnnnnnnnnnnnnnnnnnnnnnnnnnnnnnnnnnnnnnnnnnnnnnnnnnnnnnnnnnnnnnnnnnnnnnnnnnnnnnnnnnnnnnnnnnnnnnnnnnnnnnnnnnnnnnnnnnnnnnnnnnnnnnnnnnnnnnnnnnnnnnnnnnnnnnnnnnnnnnnnnnnnnnnnnnnnnnnnnnnnnnnnnnnnnnnnnnnnnnnnnnnnnnnnnnnnnnnnnnnnnnnnnnnnnnnnnnnnnnnnnnnnnnnnnnnnnnnnnnnnnnnnnnnnnnnnnnnnnnnnnnnnnnnnnnnnnnnnnnnnnnnnnnnnnnnnnnnnnnnnnnnnnnnnnnnnnnnnnnnnnnnnnnnnnnnnnnnnnnnnnnnnnnnnnnnnnnnnnnnnnnnnnnnnnnnnnnnnnnnnnnnnnnnnnnnnnnnnnnnnnnnnnnnnnnnnnnnnnnnnnnnnnnnnnnnnnnnnnnnnnnnnnnnnnnnnnnnnnnnnnnnnnnnnnnnnnnnnnnnnnnnnnnnnnnnnnnnnnnnnnnnnnnnnnnnnnnnnnnnnnnnnnnnnnnnnnnnnnnnnnnnnnnnnnnnnnnnnnnnnnnnnnnnnnnnnnnnnnnnnnnnnnnnnnnnnnnnnnnnnnnnnnnnnnnnnnnnnnnnnnnnnnnnnnnnnnnnnnnnnnnnnnnnnnnnnnnnnnnnnnnnnnnnnnnnnnnnnnnnnnnnnnnnnnnnnnnnnnnnnnnnnnnnnnnnnnnnnnnnnnnnnnnnnnnnnnnnnnnnnnnnnnnnnnnnnnnnnnnnnnnnnnnnnnnnnnnnnnnnnnnnnnnnnnnnnnnnnnnnnnnnnnnnnnnnnnnnnnnnnnnnnnnnnnnnnnnnnnnnnnnnnnnnnnnnnnnnnnnnnnnnnnnnnnnnnnnnnnnnnnnnnnnnnnnnnnnnnnnnnnnnnnnnnnnnnnnnnnnnnnnnnnnnnnnnnnnnnnnnnnnnnnnnnnnnnnnnnnnnnnnnnnnnnnnnnnnnnnnnnnnnnnnnnnnnnnnnnnnnnnnnnnnnnnnnnnnnnnnnnnnnnnnnnnnnnnnnnnnnnnnnnnnnnnnnnnnnnnnnnnnnnnnnnnnnnnnnnnnnnnnnnnnnnnnnnnnnnnnnnnnnnnnnnnnnnnnnnnnnnnnnnnnnnnnnnnnnnnnnnnnnnnnnnnnnnnnnnnnnnnnnnnnnnnnnnnnnnnnnnnnnnnnnnnnnnnnnnnnnnnnnnnnnnnnnnnnnnnnnnnnnnnnnnnnnnnnnnnnnnnnnnnnnnnnnnnnnnnnnnnnnnnnnnnnnnnnnnnnnnnnnnnnnnnnnnnnnnnnnnnnnnnnnnnnnnnnnnnnnnnnnnnnnnnnnnnnnnnnnnnnnnnnnnnnnnnnnnnnnnnnnnnnnnnnnnnnnnnnnnnnnnnnnnnnnnnnnnnnnnnnnnnnnnnnnnnnnnnnnnnnnnnnnnnnnnnnnnnnnnnnnnnnnnnnnnnnnnnnnnnnnnnnnnnnnnnnnnnnnnnnnnnnnnnnnnnnnnnnnnnnnnnnnnnnnnnnnnnnnnnnnnnnnnnnnnnnnnnnnnnnnnnnnnnnnnnnnnnnnnnnnnnnnnnnnnnnnnnnnnnnnnnnnnnnnnnnnnnnnnnnnnnnnnnnnnnnnnnnnnnnnnnnnnnnnnnnnnnnnnnnnnnnnnnnnnnnnnnnnnnnnnnnnnnnnnnnnnnnnnnnnnnnnnnnnnnnnnnnnnnnnnnnnnnnnnnnnnnnnnnnnnnnnnnnnnnnnnnnnnnnnnnnnnnnnnnnnnnnnnnnnnnnnnnnnnnnnnnnnnnnnnnnnnnnnnnnnnnnnnnnnnnnnnnnnnnnnnnnnnnnnnnnnnnnnnnnnnnnnnnnnnnnnnnnnnnnnnnnnnnnnnnnnnnnnnnnnnnnnnnnnnnnnnnnnnnnnnnnnnnnnnnnnnnnnnnnnnnnnnnnnnnnnnnnnnnnnnnnnnnnnnnnnnnnnnnnnnnnnnnnnnnnnnnnnnnnnnnnnnnnnnnnnnnnnnnnnnnnnnnnnnnnnnnnnnnnnnnnnnnnnnnnnnnnnnnnnnnnnnnnnnnnnnnnnnnnnnnnnnnnnnnnnnnnnnnnnnnnnnnnnnnnnnnnnnnnnnnnnnnnnnnnnnnnnnnnnnnnnnnnnnnnnnnnnnnnnnnnnnnnnnnnnnnnnnnnnnnnnnnnnnnnnnnnnnnnnnnnnnnnnnnnnnnnnnnnnnnnnnnnnnnnnnnnnnnnnnnnnnnnnnnnnnnnnnnnnnnnnnnnnnnnnnnnnnnnnnnnnnnnnnnnnnnnnnnnnnnnnnnnnnnnnnnnnnnnnnnnnnnnnnnnnnnnnnnnnnnnnnnnnnnnnnnnnnnnnnnnnnnnnnnnnnnnnnnnnnnnnnnnnnnnnnnnnnnnnnnnnnnnnnnnnnnnnnnnnnnnnnnnnnnnnnnnnnnnnnnnnnnnnnnnnnnnnnnnnnnnnnnnnnnnnnnnnnnnnnnnnnnnnnnnnnnnnnnnnnnnnnnnnnnnnnnnnnnnnnnnnnnnnnnnnnnnnnnnnnnnnnnnnnnnnnnnnnnnnnnnnnnnnnnnnnnnnnnnnnnnnnnnnnnnnnnnnnnnnnnnnnnnnnnnnnnnnnnnnnnnnnnnnnnnnnnnnnnnnnnnnnnnnnnnnnnnnnnnnnnnnnnnnnnnnnnnnnnnnnnnnnnnnnnnnnnnnnnnnnnnnnnnnnnnnnnnnnnnnnnnnnnnnnnnnnnnnnnnnnnnnnnnnnnnnnnnnnnnnnnnnnnnnnnnnnnnnnnnnnnnnnnnnnnnnnnnnnnnnnnnnnnnnnnnnnnnnnnnnnnnnnnnnnnnnnnnnnnnnnnnnnnnnnnnnnnnnnnnnnnnnnnnnnnnnnnnnnnnnnnnnnnnnnnnnnnnnnnnnnnnnnnnnnnnnnnnnnnnnnnnnnnnnnnnnnnnnnnnnnnnnnnnnnnnnnnnnnnnnnnnnnnnnnnnnnnnnnnnnnnnnnnnnnnnnnnnnnnnnnnnnnnnnnnnnnnnnnnnnnnnnnnnnnnnnnnnnnnnnnnnnnnnnnnnnnnnnnnnnnnnnnnnnnnnnnnnnnnnnnnnnnnnnnnnnnnnnnnnnnnnnnnnnnnnnnnnnnnnnnnnnnnnnnnnnnnnnnnnnnnnnnnnnnnnnnnnnnnnnnnnnnnnnnnnnnnnnnnnnnnnnnnnnnnnnnnnnnnnnnnnnnnnnnnnnnnnnnnnnnnnnnnnnnnnnnnnnnnnnnnnnnnnnnnnnnnnnnnnnnnnnnnnnnnnnnnnnnnnnnnnnnnnnnnnnnnnnnnnnnnnnnnnnnnnnnnnnnnnnnnnnnnnnnnnnnnnnnnnnnnnnnnnnnnnnnnnnnnnnnnnnnnnnnnnnnnnnnnnnnnnnnnnnnnnnnnnnnnnnnnnnnnnnnnnnnnnnnnnnnnnnnnnnnnnnnnnnnnnnnnnnnnnnnnnnnnnnnnnnnnnnnnnnnnnnnnnnnnnnnnnnnnnnnnnnnnnnnnnnnnnnnnnnnnnnnnnnnnnnnnnnnnnnnnnnnnnnnnnnnnnnnnnnnnnnnnnnnnnnnnnnnnnnnnnnnnnnnnnnnnnnnnnnnnnnnnnnnnnnnnnnnnnnnnnnnnnnnnnnnnnnnnnnnnnnnnnnnnnnnnnnnnnnnnnnnnnnnnnnnnnnnnnnnnnnnnnnnnnnnnnnnnnnnnnnnnnnnnnnnnnnnnnnnnnnnnnnnnnnnnnnnnnnnnnnnnnnnnnnnnnnnnnnnnnnnnnnnnnnnnnnnnnnnnnnnnnnnnnnnnnnnnnnnnnnnnnnnnnnnnnnnnnnnnnnnnnnnnnnnnnnnnnnnnnnnnnnnnnnnnnnnnnnnnnnnnnnnnnnnnnnnnnnnnnnnnnnnnnnnnnnnnnnnnnnnnnnnnnnnnnnnnnnnnnnnnnnnnnnnnnnnnnnnnnnnnnnnnnnnnnnnnnnnnnnnnnnnnnnnnnnnnnnnnnnnnnnnnnnnnnnnnnnnnnnnnnnnnnnnnnnnnnnnnnnnnnnnnnnnnnnnnnnnnnnnnnnnnnnnnnnnnnnnnnnnnnnnnnnnnnnnnnnnnnnnnnnnnnnnnnnnnnnnnnnnnnnnnnnnnnnnnnnnnnnnnnnnnnnnnnnnnnnnnnnnnnnnnnnnnnnnnnnnnnnnnnnnnnnnnnnnnnnnnnnnnnnnnnnnnnnnnnnnnnnnnnnnnnnnnnnnnnnnnnnnnnnnnnnnnnnnnnnnnnnnnnnnnnnnnnnnnnnnnnnnnnnnnnnnnnnnnnnnnnnnnnnnnnnnnnnnnnnnnnnnnnnnnnnnnnnnnnnnnnnnnnnnnnnnnnnnnnnnnnnnnnnnnnnnnnnnnnnnnnnnnnnnnnnnnnnnnnnnnnnnnnnnnnnnnnnnnnnnnnnnnnnnnnnnnnnnnnnnnnnnnnnnnnnnnnnnnnnnnnnnnnnnnnnnnnnnnnnnnnnnnnnnnnnnnnnnnnnnnnnnnnnnnnnnnnnnnnnnnnnnnnnnnnnnnnnnnnnnnnnnnnnnnnnnnnnnnnnnnnnnnnnnnnnnnnnnnnnnnnnnnnnnnnnnnnnnnnnnnnnnnnnnnnnnnnnnnnnnnnnnnnnnnnnnnnnnnnnnnnnnnnnnnnnnnnnnnnnnnnnnnnnnnnnnnnnnnnnnnnnnnnnnnnnnnnnnnnnnnnnnnnnnnnnnnnnnnnnnnnnnnnnnnnnnnnnnnnnnnnnnnnnnnnnnnnnnnnnnnnnnnnnnnnnnnnnnnnnnnnnnnnnnnnnnnnnnnnnnnnnnnnnnnnnnnnnnnnnnnnnnnnnnnnnnnnnnnnnnnnnnnnnnnnnnnnnnnnnnnnnnnnnnnnnnnnnnnnnnnnnnnnnnnnnnnnnnnnnnnnnnnnnnnnnnnnnnnnnnnnnnnnnnnnnnnnnnnnnnnnnnnnnnnnnnnnnnnnnnnnnnnnnnnnnnnnnnnnnnnnnnnnnnnnnnnnnnnnnnnnnnnnnnnnnnnnnnnnnnnnnnnnnnnnnnnnnnnnnnnnnnnnnnnnnnnnnnnnnnnnnnnnnnnnnnnnnnnnnnnnnnnnnnnnnnnnnnnnnnnnnnnnnnnnnnnnnnnnnnnnnnnnnnnnnnnnnnnnnnnnnnnnnnnnnnnnnnnnnnnnnnnnnnnnnnnnnnnnnnnnnnnnnnnnnnnnnnnnnnnnnnnnnnnnnnnnnnnnnnnnnnnnnnnnnnnnnnnnnnnnnnnnnnnnnnnnnnnnnnnnnnnnnnnnnnnnnnnnnnnnnnnnnnnnnnnnnnnnnnnnnnnnnnnnnnnnnnnnnnnnnnnnnnnnnnnnnnnnnnnnnnnnnnnnnnnnnnnnnnnnnnnnnnnnnnnnnnnnnnnnnnnnnnnnnnnnnnnnnnnnnnnnnnnnnnnnnnnnnnnnnnnnnnnnnnnnnnnnnnnnnnnnnnnnnnnnnnnnnnnnnnnnnnnnnnnnnnnnnnnnnnnnnnnnnnnnnnnnnnnnnnnnnnnnnnnnnnnnnnnnnnnnnnnnnnnnnnnnnnnnnnnnnnnnnnnnnnnnnnnnnnnnnnnnnnnnnnnnnnnnnnnnnnnnnnnnnnnnnnnnnnnnnnnnnnnnnnnnnnnnnnnnnnnnnnnnnnnnnnnnnnnnnnnnnnnnnnnnnnnnnnnnnnnnnnnnnnnnnnnnnnnnnnnnnnnnnnnnnnnnnnnnnnnnnnnnnnnnnnnnnnnnnnnnnnnnnnnnnnnnnnnnnnnnnnnnnnnnnnnnnnnnnnnnnnnnnnnnnnnnnnnnnnnnnnnnnnnnnnnnnnnnnnnnnnnnnnnnnnnnnnnnnnnnnnnnnnnnnnnnnnnnnnnnnnnnnnnnnnnnnnnnnnnnnnnnnnnnnnnnnnnnnnnnnnnnnnnnnnnnnnnnnnnnnnnnnnnnnnnnnnnnnnnnnnnnnnnnnnnnnnnnnnnnnnnnnnnnnnnnnnnnnnnnnnnnnnnnnnnnnnnnnnnnnnnnnnnnnnnnnnnnnnnnnnnnnnnnnnnnnnnnnnnnnnnnnnnnnnnnnnnnnnnnnnnnnnnnnnnnnnnnnnnnnnnnnnnnnnnnnnnnnnnnnnnnnnnnnnnnnnnnnnnnnnnnnnnnnnnnnnnnnnnnnnnnnnnnnnnnnnnnnnnnnnnnnnnnnnnnnnnnnnnnnnnnnnnnnnnnnnnnnnnnnnnnnnnnnnnnnnnnnnnnnnnnnnnnnnnnnnnnnnnnnnnnnnnnnnnnnnnnnnnnnnnnnnnnnnnnnnnnnnnnnnnnnnnnnnnnnnnnnnnnnnnnnnnnnnnnnnnnnnnnnnnnnnnnnnnnnnnnnnnnnnnnnnnnnnnnnnnnnnnnnnnnnnnnnnnnnnnnnnnnnnnnnnnnnnnnnnnnnnnnnnnnnnnnnnnnnnnnnnnnnnnnnnnnnnnnnnnnnnnnnnnnnnnnnnnnnnnnnnnnnnnnnnnnnnnnnnnnnnnnnnnnnnnnnnnnnnnnnnnnnnnnnnnnnnnnnnnnnnnnnnnnnnnnnnnnnnnnnnnnnnnnnnnnnnnnnnnnnnnnnnnnnnnnnnnnnnnnnnnnnnnnnnnnnnnnnnnnnnnnnnnnnnnnnnnnnnnnnnnnnnnnnnnnnnnnnnnnnnnnnnnnnnnnnnnnnnnnnnnnnnnnnnnnnnnnnnnnnnnnnnnnnnnnnnnnnnnnnnnnnnnnnnnnnnnnnnnnnnnnnnnnnnnnnnnnnnnnnnnnnnnnnnnnnnnnnnnnnnnnnnnnnnnnnnnnnnnnnnnnnnnnnnnnnnnnnnnnnnnnnnnnnnnnnnnnnnnnnnnnnnnnnnnnnnnnnnnnnnnnnnnnnnnnnnnnnnnnnnnnnnnnnnnnnnnnnnnnnnnnnnnnnnnnnnnnnnnnnnnnnnnnnnnnnnnnnnnnnnnnnnnnnnnnnnnnnnnnnnnnnnnnnnnnnnnnnnnnnnnnnnnnnnnnnnnnnnnnnnnnnnnnnnnnnnnnnnnnnnnnnnnnnnnnnnnnnnnnnnnnnnnnnnnnnnnnnnnnnnnnnnnnnnnnnnnnnnnnnnnnnnnnnnnnnnnnnnnnnnnnnnnnnnnnnnnnnnnnnnnnnnnnnnnnnnnnnnnnnnnnnnnnnnnnnnnnnnnnnnnnnnnnnnnnnnnnnnnnnnnnnnnnnnnnnnnnnnnnnnnnnnnnnnnnnnnnnnnnnnnnnnnnnnnnnnnnnnnnnnnnnnnnnnnnnnnnnnnnnnnnnnnnnnnnnnnnnnnnnnnnnnnnnnnnnnnnnnnnnnnnnnnnnnnnnnnnnnnnnnnnnnnnnnnnnnnnnnnnnnnnnnnnnnnnnnnnnnnnnnnnnnnnnnnnnnnnnnnnnnnnnnnnnnnnnnnnnnnnnnnnnnnnnnnnnnnnnnnnnnnnnnnnnnnnnnnnnnnnnnnnnnnnnnnnnnnnnnnnnnnnnnnnnnnnnnnnnnnnnnnnnnnnnnnnnnnnnnnnnnnnnnnnnnnnnnnnnnnnnnnnnnnnnnnnnnnnnnnnnnnnnnnnnnnnnnnnnnnnnnnnnnnnnnnnnnnnnnnnnnnnnnnnnnnnnnnnnnnnnnnnnnnnnnnnnnnnnnnnnnnnnnnnnnnnnnnnnnnnnnnnnnnnnnnnnnnnnnnnnnnnnnnnnnnnnnnnnnnnnnnnnnnnnnnnnnnnnnnnnnnnnnnnnnnnnnnnnnnnnnnnnnnnnnnnnnnnnnnnnnnnnnnnnnnnnnnnnnnnnnnnnnnnnnnnnnnnnnnnnnnnnnnnnnnnnnnnnnnnnnnnnnnnnnnnnnnnnnnnnnnnnnnnnnnnnnnnnnnnnnnnnnnnnnnnnnnnnnnnnnnnnnnnnnnnnnnnnnnnnnnnnnnnnnnnnnnnnnnnnnnnnnnnnnnnnnnnnnnnnnnnnnnnnnnnnnnnnnnnnnnnnnnnnnnnnnnnnnnnnnnnnnnnnnnnnnnnnnnnnnnnnnnnnnnnnnnnnnnnnnnnnnnnnnnnnnnnnnnnnnnnnnnnnnnnnnnnnnnnnnnnnnnnnnnnnnnnnnnnnnnnnnnnnnnnnnnnnnnnnnnnnnnnnnnnnnnnnnnnnnnnnnnnnnnnnnnnnnnnnnnnnnnnnnnnnnnnnnnnnnnnnnnnnnnnnnnnnnnnnnnnnnnnnnnnnnnnnnnnnnnnnnnnnnnnnnnnnnnnnnnnnnnnnnnnnnnnnnnnnnnnnnnnnnnnnnnnnnnnnnnnnnnnnnnnnnnnnnnnnnnnnnnnnnnnnnnnnnnnnnnnnnnnnnnnnnnnnnnnnnnnnnnnnnnnnnnnnnnnnnnnnnnnnnnnnnnnnnnnnnnnnnnnnnnnnnnnnnnnnnnnnnnnnnnnnnnnnnnnnnnnnnnnnnnnnnnnnnnnnnnnnnnnnnnnnnnnnnnnnnnnnnnnnnnnnnnnnnnnnnnnnnnnnnnnnnnnnnnnnnnnnnnnnnnnnnnnnnnnnnnnnnnnnnnnnnnnnnnnnnnnnnnnnnnnnnnnnnnnnnnnnnnnnnnnnnnnnnnnnnnnnnnnnnnnnnnnnnnnnnnnnnnnnnnnnnnnnnnnnnnnnnnnnnnnnnnnnnnnnnnnnnnnnnnnnnnnnnnnnnnnnnnnnnnnnnnnnnnnnnnnnnnnnnnnnnnnnnnnnnnnnnnnnnnnnnnnnnnnnnnnnnnnnnnnnnnnnnnnnnnnnnnnnnnnnnnnnnnnnnnnnnnnnnnnnnnnnnnnnnnnnnnnnnnnnnnnnnnnnnnnnnnnnnnnnnnnnnnnnnnnnnnnnnnnnnnnnnnnnnnnnnnnnnnnnnnnnnnnnnnnnnnnnnnnnnnnnnnnnnnnnnnnnnnnnnnnnnnnnnnnnnnnnnnnnnnnnnnnnnnnnnnnnnnnnnnnnnnnnnnnnnnnnnnnnnnnnnnnnnnnnnnnnnnnnnnnnnnnnnnnnnnnnnnnnnnnnnnnnnnnnnnnnnnnnnnnnnnnnnnnnnnnnnnnnnnnnnnnnnnnnnnnnnnnnnnnnnnnnnnnnnnnnnnnnnnnnnnnnnnnnnnnnnnnnnnnnnnnnnnnnnnnnnnnnnnnnnnnnnnnnnnnnnnnnnnnnnnnnnnnnnnnnnnnnnnnnnnnnnnnnnnnnnnnnnnnnnnnnnnnnnnnnnnnnnnnnnnnnnnnnnnnnnnnnnnnnnnnnnnnnnnnnnnnnnnnnnnnnnnnnnnnnnnnnnnnnnnnnnnnnnnnnnnnnnnnnnnnnnnnnnnnnnnnnnnnnnnnnnnnnnnnnnnnnnnnnnnnnnnnnnnnnnnnnnnnnnnnnnnnnnnnnnnnnnnnnnnnnnnnnnnnnnnnnnnnnnnnnnnnnnnnnnnnnnnnnnnnnnnnnnnnnnnnnnnnnnnnnnnnnnnnnnnnnnnnnnnnnnnnnnnnnnnnnnnnnnnnnnnnnnnnnnnnnnnnnnnnnnnnnnnnnnnnnnnnnnnnnnnnnnnnnnnnnnnnnnnnnnnnnnnnnnnnnnnnnnnnnnnnnnnnnnnnnnnnnnnnnnnnnnnnnnnnnnnnnnnnnnnnnnnnnnnnnnnnnnnnnnnnnnnnnnnnnnnnnnnnnnnnnnnnnnnnnnnnnnnnnnnnnnnnnnnnnnnnnnnnnnnnnnnnnnnnnnnnnnnnnnnnnnnnnnnnnnnnnnnnnnnnnnnnnnnnnnnnnnnnnnnnnnnnnnnnnnnnnnnnnnnnnnnnnnnnnnnnnnnnnnnnnnnnnnnnnnnnnnnnnnnnnnnnnnnnnnnnnnnnnnnnnnnnnnnnnnnnnnnnnnnnnnnnnnnnnnnnnnnnnnnnnnnnnnnnnnnnnnnnnnnnnnnnnnnnnnnnnnnnnnnnnnnnnnnnnnnnnnnnnnnnnnnnnnnnnnnnnnnnnnnnnnnnnnnnnnnnnnnnnnnnnnnnnnnnnnnnnnnnnnnnnnnnnnnnnnnnnnnnnnnnnnnnnnnnnnnnnnnnnnnnnnnnnnnnnnnnnnnnnnnnnnnnnnnnnnnnnnnnnnnnnnnnnnnnnnnnnnnnnnnnnnnnnnnnnnnnnnnnnnnnnnnnnnnnnnnnnnnnnnnnnnnnnnnnnnnnnnnnnnnnnnnnnnnnnnnnnnnnnnnnnnnnnnnnnnnnnnnnnnnnnnnnnnnnnnnnnnnnnnnnnnnnnnnnnnnnnnnnnnnnnnnnnnnnnnnnnnnnnnnnnnnnnnnnnnnnnnnnnnnnnnnnnnnnnnnnnnnnnnnnnnnnnnnnnnnnnnnnnnnnnnnnnnnnnnnnnnnnnnnnnnnnnnnnnnnnnnnnnnnnnnnnnnnnnnnnnnnnnnnnnnnnnnnnnnnnnnnnnnnnnnnnnnnnnnnnnnnnnnnnnnnnnnnnnnnnnnnnnnnnnnnnnnnnnnnnnnnnnnnnnnnnnnnnnnnnnnnnnnnnnnnnnnnnnnnnnnnnnnnnnnnnnnnnnnnnnnnnnnnnnnnnnnnnnnnnnnnnnnnnnnnnnnnnnnnnnnnnnnnnnnnnnnnnnnnnnnnnnnnnnnnnnnnnnnnnnnnnnnnnnnnnnnnnnnnnnnnnnnnnnnnnnnnnnnnnnnnnnnnnnnnnnnnnnnnnnnnnnnnnnnnnnnnnnnnnnnnnnnnnnnnnnnnnnnnnnnnnnnnnnnnnnnnnnnnnnnnnnnnnnnnnnnnnnnnnnnnnnnnnnnnnnnnnnnnnnnnnnnnnnnnnnnnnnnnnnnnnnnnnnnnnnnnnnnnnnnnnnnnnnnnnnnnnnnnnnnnnnnnnnnnnnnnnnnnnnnnnnnnnnnnnnnnnnnnnnnnnnnnnnnnnnnnnnnnnnnnnnnnnnnnnnnnnnnnnnnnnnnnnnnnnnnnnnnnnnnnnnnnnnnnnnnnnnnnnnnnnnnnnnnnnnnnnnnnnnnnnnnnnnnnnnnnnnnnnnnnnnnnnnnnnnnnnnnnnnnnnnnnnnnnnnnnnnnnnnnnnnnnnnnnnnnnnnnnnnnnnnnnnnnnnnnnnnnnnnnnnnnnnnnnnnnnnnnnnnnnnnnnnnnnnnnnnnnnnnnnnnnnnnnnnnnnnnnnnnnnnnnnnnnnnnnnnnnnnnnnnnnnnnnnnnnnnnnnnnnnnnnnnnnnnnnnnnnnnnnnnnnnnnnnnnnnnnnnnnnnnnnnnnnnnnnnnnnnnnnnnnnnnnnnnnnnnnnnnnnnnnnnnnnnnnnnnnnnnnnnnnnnnnnnnnnnnnnnnnnnnnnnnnnnnnnnnnnnnnnnnnnnnnnnnnnnnnnnnnnnnnnnnnnnnnnnnnnnnnnnnnnnnnnnnnnnnnnnnnnnnnnnnnnnnnnnnnnnnnnnnnnnnnnnnnnnnnnnnnnnnnnnnnnnnnnnnnnnnnnnnnnnnnnnnnnnnnnnnnnnnnnnnnnnnnnnnnnnnnnnnnnnnnnnnnnnnnnnnnnnnnnnnnnnnnnnnnnnnnnnnnnnnnnnnnnnnnnnnnnnnnnnnnnnnnnnnnnnnnnnnnnnnnnnnnnnnnnnnnnnnnnnnnnnnnnnnnnnnnnnnnnnnnnnnnnnnnnnnnnnnnnnnnnnnnnnnnnnnnnnnnnnnnnnnnnnnnnnnnnnnnnnnnnnnnnnnnnnnnnnnnnnnnnnnnnnnnnnnnnnnnnnnnnnnnnnnnnnnnnnnnnnnnnnnnnnnnnnnnnnnnnnnnnnnnnnnnnnnnnnnnnnnnnnnnnnnnnnnnnnnnnnnnnnnnnnnnnnnnnnnnnnnnnnnnnnnnnnnnnnnnnnnnnnnnnnnnnnnnnnnnnnnnnnnnnnnnnnnnnnnnnnnnnnnnnnnnnnnnnnnnnnnnnnnnnnnnnnnnnnnnnnnnnnnnnnnnnnnnnnnnnnnnnnnnnnnnnnnnnnnnnnnnnnnnnnnnnnnnnnnnnnnnnnnnnnnnnnnnnnnnnnnnnnnnnnnnnnnnnnnnnnnnnnnnnnnnnnnnnnnnnnnnnnnnnnnnnnnnnnnnnnnnnnnnnnnnnnnnnnnnnnnnnnnnnnnnnnnnnnnnnnnnnnnnnnnnnnnnnnnnnnnnnnnnnnnnnnnnnnnnnnnnnnnnnnnnnnnnnnnnnnnnnnnnnnnnnnnnnnnnnnnnnnnnnnnnnnnnnnnnnnnnnnnnnnnnnnnnnnnnnnnnnnnnnnnnnnnnnnnnnnnnnnnnnnnnnnnnnnnnnnnnnnnnnnnnnnnnnnnnnnnnnnnnnnnnnnnnnnnnnnnnnnnnnnnnnnnnnnnnnnnnnnnnnnnnnnnnnnnnnnnnnnnnnnnnnnnnnnnnnnnnnnnnnnnnnnnnnnnnnnnnnnnnnnnnnnnnnnnnnnnnnnnnnnnnnnnnnnnnnnnnnnnnnnnnnnnnnnnnnnnnnnnnnnnnnnnnnnnnnnnnnnnnnnnnnnnnnnnnnnnnnnnnnnnnnnnnnnnnnnnnnnnnnnnnnnnnnnnnnnnnnnnnnnnnnnnnnnnnnnnnnnnnnnnnnnnnnnnnnnnnnnnnnnnnnnnnnnnnnnnnnnnnnnnnnnnnnnnnnnnnnnnnnnnnnnnnnnnnnnnnnnnnnnnnnnnnnnnnnnnnnnnnnnnnnnnnnnnnnnnnnnnnnnnnnnnnnnnnnnnnnnnnnnnnnnnnnnnnnnnnnnnnnnnnnnnnnnnnnnnnnnnnnnnnnnnnnnnnnnnnnnnnnnnnnnnnnnnnnnnnnnnnnnnnnnnnnnnnnnnnnnnnnnnnnnnnnnnnnnnnnnnnnnnnnnnnnnnnnnnnnnnnnnnnnnnnnnnnnnnnnnnnnnnnnnnnnnnnnnnnnnnnnnnnnnnnnnnnnnnnnnnnnnnnnnnnnnnnnnnnnnnnnnnnnnnnnnnnnnnnnnnnnnnnnnnnnnnnnnnnnnnnnnnnnnnnnnnnnnnnnnnnnnnnnnnnnnnnnnnnnnnnnnnnnnnnnnnnnnnnnnnnnnnnnnnnnnnnnnnnnnnnnnnnnnnnnnnnnnnnnnnnnnnnnnnnnnnnnnnnnnnnnnnnnnnnnnnnnnnnnnnnnnnnnnnnnnnnnnnnnnnnnnnnnnnnnnnnnnnnnnnnnnnnnnnnnnnnnnnnnnnnnnnnnnnnnnnnnnnnnnnnnnnnnnnnnnnnnnnnnnnnnnnnnnnnnnnnnnnnnnnnnnnnnnnnnnnnnnnnnnnnnnnnnnnnnnnnnnnnnnnnnnnnnnnnnnnnnnnnnnnnnnnnnnnnnnnnnnnnnnnnnnnnnnnnnnnnnnnnnnnnnnnnnnnnnnnnnnnnnnnnnnnnnnnnnnnnnnnnnnnnnnnnnnnnnnnnnnnnnnnnnnnnnnnnnnnnnnnnnnnnnnnnnnnnnnnnnnnnnnnnnnnnnnnnnnnnnnnnnnnnnnnnnnnnnnnnnnnnnnnnnnnnnnnnnnnnnnnnnnnnnnnnnnnnnnnnnnnnnnnnnnnnnnnnnnnnnnnnnnnnnnnnnnnnnnnnnnnnnnnnnnnnnnnnnnnnnnnnnnnnnnnnnnnnnnnnnnnnnnnnnnnnnnnnnnnnnnnnnnnnnnnnnnnnnnnnnnnnnnnnnnnnnnnnnnnnnnnnnnnnnnnnnnnnnnnnnnnnnnnnnnnnnnnnnnnnnnnnnnnnnnnnnnnnnnnnnnnnnnnnnnnnnnnnnnnnnnnnnnnnnnnnnnnnnnnnnnnnnnnnnnnnnnnnnnnnnnnnnnnnnnnnnnnnnnnnnnnnnnnnnnnnnnnnnnnnnnnnnnnnnnnnnnnnnnnnnnnnnnnnnnnnnnnnnnnnnnnnnnnnnnnnnnnnnnnnnnnnnnnnnnnnnnnnnnnnnnnnnnnnnnnnnnnnnnnnnnnnnnnnnnnnnnnnnnnnnnnnnnnnnnnnnnnnnnnnnnnnnnnnnnnnnnnnnnnnnnnnnnnnnnnnnnnnnnnnnnnnnnnnnnnnnnnnnnnnnnnnnnnnnnnnnnnnnnnnnnnnnnnnnnnnnnnnnnnnnnnnnnnnnnnnnnnnnnnnnnnnnnnnnnnnnnnnnnnnnnnnnnnnnnnnnnnnnnnnnnnnnnnnnnnnnnnnnnnnnnnnnnnnnnnnnnnnnnnnnnnnnnnnnnnnnnnnnnnnnnnnnnnnnnnnnnnnnnnnnnnnnnnnnnnnnnnnnnnnnnnnnnnnnnnnnnnnnnnnnnnnnnnnnnnnnnnnnnnnnnnnnnnnnnnnnnnnnnnnnnnnnnnnnnnnnnnnnnnnnnnnnnnnnnnnnnnnnnnnnnnnnnnnnnnnnnnnnnnnnnnnnnnnnnnnnnnnnnnnnnnnnnnnnnnnnnnnnnnnnnnnnnnnnnnnnnnnnnnnnnnnnnnnnnnnnnnnnnnnnnnnnnnnnnnnnnnnnnnnnnnnnnnnnnnnnnnnnnnnnnnnnnnnnnnnnnnnnnnnnnnnnnnnnnnnnnnnnnnnnnnnnnnnnnnnnnnnnnnnnnnnnnnnnnnnnnnnnnnnnnnnnnnnnnnnnnnnnnnnnnnnnnnnnnnnnnnnnnnnnnnnnnnnnnnnnnnnnnnnnnnnnnnnnnnnnnnnnnnnnnnnnnnnnnnnnnnnnnnnnnnnnnnnnnnnnnnnnnnnnnnnnnnnnnnnnnnnnnnnnnnnnnnnnnnnnnnnnnnnnnnnnnnnnnnnnnnnnnnnnnnnnnnnnnnnnnnnnnnnnnnnnnnnnnnnnnnnnnnnnnnnnnnnnnnnnnnnnnnnnnnnnnnnnnnnnnnnnnnnnnnnnnnnnnnnnnnnnnnnnnnnnnnnnnnnnnnnnnnnnnnnnnnnnnnnnnnnnnnnnnnnnnnnnnnnnnnnnnnnnnnnnnnnnnnnnnnnnnnnnnnnnnnnnnnnnnnnnnnnnnnnnnnnnnnnnnnnnnnnnnnnnnnnnnnnnnnnnnnnnnnnnnnnnnnnnnnnnnnnnnnnnnnnnnnnnnnnnnnnnnnnnnnnnnnnnnnnnnnnnnnnnnnnnnnnnnnnnnnnnnnnnnnnnnnnnnnnnnnnnnnnnnnnnnnnnnnnnnnnnnnnnnnnnnnnnnnnnnnnnnnnnnnnnnnnnnnnnnnnnnnnnnnnnnnnnnnnnnnnnnnnnnnnnnnnnnnnnnnnnnnnnnnnnnnnnnnnnnnnnnnnnnnnnnnnnnnnnnnnnnnnnnnnnnnnnnnnnnnnnnnnnnnnnnnnnnnnnnnnnnnnnnnnnnnnnnnnnnnnnnnnnnnnnnnnnnnnnnnnnnnnnnnnnnnnnnnnnnnnnnnnnnnnnnnnnnnnnnnnnnnnnnnnnnnnnnnnnnnnnnnnnnnnnnnnnnnnnnnnnnnnnnnnnnnnnnnnnnnnnnnnnnnnnnnnnnnnnnnnnnnnnnnnnnnnnnnnnnnnnnnnnnnnnnnnnnnnnnnnnnnnnnnnnnnnnnnnnnnnnnnnnnnnnnnnnnnnnnnnnnnnnnnnnnnnnnnnnnnnnnnnnnnnnnnnnnnnnnnnnnnnnnnnnnnnnnnnnnnnnnnnnnnnnnnnnnnnnnnnnnnnnnnnnnnnnnnnnnnnnnnnnnnnnnnnnnnnnnnnnnnnnnnnnnnnnnnnnnnnnnnnnnnnnnnnnnnnnnnnnnnnnnnnnnnnnnnnnnnnnnnnnnnnnnnnnnnnnnnnnnnnnnnnnnnnnnnnnnnnnnnnnnnnnnnnnnnnnnnnnnnnnnnnnnnnnnnnnnnnnnnnnnnnnnnnnnnnnnnnnnnnnnnnnnnnnnnnnnnnnnnnnnnnnnnnnnnnnnnnnnnnnnnnnnnnnnnnnnnnnnnnnnnnnnnnnnnnnnnnnnnnnnnnnnnnnnnnnnnnnnnnnnnnnnnnnnnnnnnnnnnnnnnnnnnnnnnnnnnnnnnnnnnnnnnnnnnnnnnnnnnnnnnnnnnnnnnnnnnnnnnnnnnnnnnnnnnnnnnnnnnnnnnnnnnnnnnnnnnnnnnnnnnnnnnnnnnnnnnnnnnnnnnnnnnnnnnnnnnnnnnnnnnnnnnnnnnnnnnnnnnnnnnnnnnnnnnnnnnnnnnnnnnnnnnnnnnnnnnnnnnnnnnnnnnnnnnnnnnnnnnnnnnnnnnnnnnnnnnnnnnnnnnnnnnnnnnnnnnnnnnnnnnnnnnnnnnnnnnnnnnnnnnnnnnnnnnnnnnnnnnnnnnnnnnnnnnnnnnnnnnnnnnnnnnnnnnnnnnnnnnnnnnnnnnnnnnnnnnnnnnnnnnnnnnnnnnnnnnnnnnnnnnnnnnnnnnnnnnnnnnnnnnnnnnnnnnnnnnnnnnnnnnnnnnnnnnnnnnnnnnnnnnnnnnnnnnnnnnnnnnnnnnnnnnnnnnnnnnnnnnnnnnnnnnnnnnnnnnnnnnnnnnnnnnnnnnnnnnnnnnnnnnnnnnnnnnnnnnnnnnnnnnnnnnnnnnnnnnnnnnnnnnnnnnnnnnnnnnnnnnnnnnnnnnnnnnnnnnnnnnnnnnnnnnnnnnnnnnnnnnnnnnnnnnnnnnnnnnnnnnnnnnnnnnnnnnnnnnnnnnnnnnnnnnnnnnnnnnnnnnnnnnnnnnnnnnnnnnnnnnnnnnnnnnnnnnnnnnnnnnnnnnnnnnnnnnnnnnnnnnnnnnnnnnnnnnnnnnnnnnnnnnnnnnnnnnnnnnnnnnnnnnnnnnnnnnnnnnnnnnnnnnnnnnnnnnnnnnnnnnnnnnnnnnnnnnnnnnnnnnnnnnnnnnnnnnnnnnnnnnnnnnnnnnnnnnnnnnnnnnnnnnnnnnnnnnnnnnnnnnnnnnnnnnnnnnnnnnnnnnnnnnnnnnnnnnnnnnnnnnnnnnnnnnnnnnnnnnnnnnnnnnnnnnnnnnnnnnnnnnnnnnnnnnnnnnnnnnnnnnnnnnnnnnnnnnnnnnnnnnnnnnnnnnnnnnnnnnnnnnnnnnnnnnnnnnnnnnnnnnnnnnnnnnnnnnnnnnnnnnnnnnnnnnnnnnnnnnnnnnnnnnnnnnnnnnnnnnnnnnnnnnnnnnnnnnnnnnnnnnnnnnnnnnnnnnnnnnnnnnnnnnnnnnnnnnnnnnnnnnnnnnnnnnnnnnnnnnnnnnnnnnnnnnnnnnnnnnnnnnnnnnnnnnnnnnnnnnnnnnnnnnnnnnnnnnnnnnnnnnnnnnnnnnnnnnnnnnnnnnnnnnnnnnnnnnnnnnnnnnnnnnnnnnnnnnnnnnnnnnnnnnnnnnnnnnnnnnnnnnnnnnnnnnnnnnnnnnnnnnnnnnnnnnnnnnnnnnnnnnnnnnnnnnnnnnnnnnnnnnnnnnnnnnnnnnnnnnnnnnnnnnnnnnnnnnnnnnnnnnnnnnnnnnnnnnnnnnnnnnnnnnnnnnnnnnnnnnnnnnnnnnnnnnnnnnnnnnnnnnnnnnnnnnnnnnnnnnnnnnnnnnnnnnnnnnnnnnnnnnnnnnnnnnnnnnnnnnnnnnnnnnnnnnnnnnnnnnnnnnnnnnnnnnnnnnnnnnnnnnnnnnnnnnnnnnnnnnnnnnnnnnnnnnnnnnnnnnnnnnnnnnnnnnnnnnnnnnnnnnnnnnnnnnnnnnnnnnnnnnnnnnnnnnnnnnnnnnnnnnnnnnnnnnnnnnnnnnnnnnnnnnnnnnnnnnnnnnnnnnnnnnnnnnnnnnnnnnnnnnnnnnnnnnnnnnnnnnnnnnnnnnnnnnnnnnnnnnnnnnnnnnnnnnnnnnnnnnnnnnnnnnnnnnnnnnnnnnnnnnnnnnnnnnnnnnnnnnnnnnnnnnnnnnnnnnnnnnnnnnnnnnnnnnnnnnnnnnnnnnnnnnnnnnnnnnnnnnnnnnnnnnnnnnnnnnnnnnnnnnnnnnnnnnnnnnnnnnnnnnnnnnnnnnnnnnnnnnnnnnnnnnnnnnnnnnnnnnnnnnnnnnnnnnnnnnnnnnnnnnnnnnnnnnnnnnnnnnnnnnnnnnnnnnnnnnnnnnnnnnnnnnnnnnnnnnnnnnnnnnnnnnnnnnnnnnnnnnnnnnnnnnnnnnnnnnnnnnnnnnnnnnnnnnnnnnnnnnnnnnnnnnnnnnnnnnnnnnnnnnnnnnnnnnnnnnnnnnnnnnnnnnnnnnnnnnnnnnnnnnnnnnnnnnnnnnnnnnnnnnnnnnnnnnnnnnnnnnnnnnnnnnnnnnnnnnnnnnnnnnnnnnnnnnnnnnnnnnnnnnnnnnnnnnnnnnnnnnnnnnnnnnnnnnnnnnnnnnnnnnnnnnnnnnnnnnnnnnnnnnnnnnnnnnnnnnnnnnnnnnnnnnnnnnnnnnnnnnnnnnnnnnnnnnnnnnnnnnnnnnnnnnnnnnnnnnnnnnnnnnnnnnnnnnnnnnnnnnnnnnnnnnnnnnnnnnnnnnnnnnnnnnnnnnnnnnnnnnnnnnnnnnnnnnnnnnnnnnnnnnnnnnnnnnnnnnnnnnnnnnnnnnnnnnnnnnnnnnnnnnnnnnnnnnnnnnnnnnnnnnnnnnnnnnnnnnnnnnnnnnnnnnnnnnnnnnnnnnnnnnnnnnnnnnnnnnnnnnnnnnnnnnnnnnnnnnnnnnnnnnnnnnnnnnnnnnnnnnnnnnnnnnnnnnnnnnnnnnnnnnnnnnnnnnnnnnnnnnnnnnnnnnnnnnnnnnnnnnnnnnnnnnnnnnnnnnnnnnnnnnnnnnnnnnnnnnnnnnnnnnnnnnnnnnnnnnnnnnnnnnnnnnnnnnnnnnnnnnnnnnnnnnnnnnnnnnnnnnnnnnnnnnnnnnnnnnnnnnnnnnnnnnnnnnnnnnnnnnnnnnnnnnnnnnnnnnnnnnnnnnnnnnnnnnnnnnnnnnnnnnnnnnnnnnnnnnnnnnnnnnnnnnnnnnnnnnnnnnnnnnnnnnnnnnnnnnnnnnnnnnnnnnnnnnnnnnnnnnnnnnnnnnnnnnnnnnnnnnnnnnnnnnnnnnnnnnnnnnnnnnnnnnnnnnnnnnnnnnnnnnnnnnnnnnnnnnnnnnnnnnnnnnnnnnnnnnnnnnnnnnnnnnnnnnnnnnnnnnnnnnnnnnnnnnnnnnnnnnnnnnnnnnnnnnnnnnnnnnnnnnnnnnnnnnnnnnnnnnnnnnnnnnnnnnnnnnnnnnnnnnnnnnnnnnnnnnnnnnnnnnnnnnnnnnnnnnnnnnnnnnnnnnnnnnnnnnnnnnnnnnnnnnnnnnnnnnnnnnnnnnnnnnnnnnnnnnnnnnnnnnnnnnnnnnnnnnnnnnnnnnnnnnnnnnnnnnnnnnnnnnnnnnnnnnnnnnnnnnnnnnnnnnnnnnnnnnnnnnnnnnnnnnnnnnnnnnnnnnnnnnnnnnnnnnnnnnnnnnnnnnnnnnnnnnnnnnnnnnnnnnnnnnnnnnnnnnnnnnnnnnnnnnnnnnnnnnnnnnnnnnnnnnnnnnnnnnnnnnnnnnnnnnnnnnnnnnnnnnnnnnnnnnnnnnnnnnnnnnnnnnnnnnnnnnnnnnnnnnnnnnnnnnnnnnnnnnnnnnnnnnnnnnnnnnnnnnnnnnnnnnnnnnnnnnnnnnnnnnnnnnnnnnnnnnnnnnnnnnnnnnnnnnnnnnnnnnnnnnnnnnnnnnnnnnnnnnnnnnnnnnnnnnnnnnnnnnnnnnnnnnnnnnnnnnnnnnnnnnnnnnnnnnnnnnnnnnnnnnnnnnnnnnnnnnnnnnnnnnnnnnnnnnnnnnnnnnnnnnnnnnnnnnnnnnnnnnnnnnnnnnnnnnnnnnnnnnnnnnnnnnnnnnnnnnnnnnnnnnnnnnnnnnnnnnnnnnnnnnnnnnnnnnnnnnnnnnnnnnnnnnnnnnnnnnnnnnnnnnnnnnnnnnnnnnnnnnnnnnnnnnnnnnnnnnnnnnnnnnnnnnnnnnnnnnnnnnnnnnnnnnnnnnnnnnnnnnnnnnnnnnnnnnnnnnnnnnnnnnnnnnnnnnnnnnnnnnnnnnnnnnnnnnnnnnnnnnnnnnnnnnnnnnnnnnnnnnnnnnnnnnnnnnnnnnnnnnnnnnnnnnnnnnnnnnnnnnnnnnnnnnnnnnnnnnnnnnnnnnnnnnnnnnnnnnnnnnnnnnnnnnnnnnnnnnnnnnnnnnnnnnnnnnnnnnnnnnnnnnnnnnnnnnnnnnnnnnnnnnnnnnnnnnnnnnnnnnnnnnnnnnnnnnnnnnnnnnnnnnnnnnnnnnnnnnnnnnnnnnnnnnnnnnnnnnnnnnnnnnnnnnnnnnnnnnnnnnnnnnnnnnnnnnnnnnnnnnnnnnnnnnnnnnnnnnnnnnnnnnnnnnnnnnnnnnnnnnnnnnnnnnnnnnnnnnnnnnnnnnnnnnnnnnnnnnnnnnnnnnnnnnnnnnnnnnnnnnnnnnnnnnnnnnnnnnnnnnnnnnnnnnnnnnnnnnnnnnnnnnnnnnnnnnnnnnnnnnnnnnnnnnnnnnnnnnnnnnnnnnnnnnnnnnnnnnnnnnnnnnnnnnnnnnnnnnnnnnnnnnnnnnnnnnnnnnnnnnnnnnnnnnnnnnnnnnnnnnnnnnnnnnnnnnnnnnnnnnnnnnnnnnnnnnnnnnnnnnnnnnnnnnnnnnnnnnnnnnnnnnnnnnnnnnnnnnnnnnnnnnnnnnnnnnnnnnnnnnnnnnnnnnnnnnnnnnnnnnnnnnnnnnnnnnnnnnnnnnnnnnnnnnnnnnnnnnnnnnnnnnnnnnnnnnnnnnnnnnnnnnnnnnnnnnnnnnnnnnnnnnnnnnnnnnnnnnnnnnnnnnnnnnnnnnnnnnnnnnnnnnnnnnnnnnnnnnnnnnnnnnnnnnnnnnnnnnnnnnnnnnnnnnnnnnnnnnnnnnnnnnnnnnnnnnnnnnnnnnnnnnnnnnnnnnnnnnnnnnnnnnnnnnnnnnnnnnnnnnnnnnnnnnnnnnnnnnnnnnnnnnnnnnnnnnnnnnnnnnnnnnnnnnnnnnnnnnnnnnnnnnnnnnnnnnnnnnnnnnnnnnnnnnnnnnnnnnnnnnnnnnnnnnnnnnnnnnnnnnnnnnnnnnnnnnnnnnnnnnnnnnnnnnnnnnnnnnnnnnnnnnnnnnnnnnnnnnnnnnnnnnnnnnnnnnnnnnnnnnnnnnnnnnnnnnnnnnnnnnnnnnnnnnnnnnnnnnnnnnnnnnnnnnnnnnnnnnnnnnnnnnnnnnnnnnnnnnnnnnnnnnnnnnnnnnnnnnnnnnnnnnnnnnnnnnnnnnnnnnnnnnnnnnnnnnnnnnnnnnnnnnnnnnnnnnnnnnnnnnnnnnnnnnnnnnnnnnnnnnnnnnnnnnnnnnnnnnnnnnnnnnnnnnnnnnnnnnnnnnnnnnnnnnnnnnnnnnnnnnnnnnnnnnnnnnnnnnnnnnnnnnnnnnnnnnnnnnnnnnnnnnnnnnnnnnnnnnnnnnnnnnnnnnnnnnnnnnnnnnnnnnnnnnnnnnnnnnnnnnnnnnnnnnnnnnnnnnnnnnnnnnnnnnnnnnnnnnnnnnnnnnnnnnnnnnnnnnnnnnnnnnnnnnnnnnnnnnnnnnnnnnnnnnnnnnnnnnnnnnnnnnnnnnnnnnnnnnnnnnnnnnnnnnnnnnnnnnnnnnnnnnnnnnnnnnnnnnnnnnnnnnnnnnnnnnnnnnnnnnnnnnnnnnnnnnnnnnnnnnnnnnnnnnnnnnnnnnnnnnnnnnnnnnnnnnnnnnnnnnnnnnnnnnnnnnnnnnnnnnnnnnnnnnnnnnnnnnnnnnnnnnnnnnnnnnnnnnnnnnnnnnnnnnnnnnnnnnnnnnnnnnnnnnnnnnnnnnnnnnnnnnnnnnnnnnnnnnnnnnnnnnnnnnnnnnnnnnnnnnnnnnnnnnnnnnnnnnnnnnnnnnnnnnnnnnnnnnnnnnnnnnnnnnnnnnnnnnnnnnnnnnnnnnnnnnnnnnnnnnnnnnnnnnnnnnnnnnnnnnnnnnnnnnnnnnnnnnnnnnnnnnnnnnnnnnnnnnnnnnnnnnnnnnnnnnnnnnnnnnnnnnnnnnnnnnnnnnnnnnnnnnnnnnnnnnnnnnnnnnnnnnnnnnnnnnnnnnnnnnnnnnnnnnnnnnnnnnnnnnnnnnnnnnnnnnnnnnnnnnnnnnnnnnnnnnnnnnnnnnnnnnnnnnnnnnnnnnnnnnnnnnnnnnnnnnnnnnnnnnnnnnnnnnnnnnnnnnnnnnnnnnnnnnnnnnnnnnnnnnnnnnnnnnnnnnnnnnnnnnnnnnnnnnnnnnnnnnnnnnnnnnnnnnnnnnnnnnnnnnnnnnnnnnnnnnnnnnnnnnnnnnnnnnnnnnnnnnnnnnnnnnnnnnnnnnnnnnnnnnnnnnnnnnnnnnnnnnnnnnnnnnnnnnnnnnnnnnnnnnnnnnnnnnnnnnnnnnnnnnnnnnnnnnnnnnnnnnnnnnnnnnnnnnnnnnnnnnnnnnnnnnnnnnnnnnnnnnnnnnnnnnnnnnnnnnnnnnnnnnnnnnnnnnnnnnnnnnnnnnnnnnnnnnnnnnnnnnnnnnnnnnnnnnnnnnnnnnnnnnnnnnnnnnnnnnnnnnnnnnnnnnnnnnnnnnnnnnnnnnnnnnnnnnnnnnnnnnnnnnnnnnnnnnnnnnnnnnnnnnnnnnnnnnnnnnnnnnnnnnnnnnnnnnnnnnnnnnnnnnnnnnnnnnnnnnnnnnnnnnnnnnnnnnnnnnnnnnnnnnnnnnnnnnnnnnnnnnnnnnnnnnnnnnnnnnnnnnnnnnnnnnnnnnnnnnnnnnnnnnnnnnnnnnnnnnnnnnnnnnnnnnnnnnnnnnnnnnnnnnnnnnnnnnnnnnnnnnnnnnnnnnnnnnnnnnnnnnnnnnnnnnnnnnnnnnnnnnnnnnnnnnnnnnnnnnnnnnnnnnnnnnnnnnnnnnnnnnnnnnnnnnnnnnnnnnnnnnnnnnnnnnnnnnnnnnnnnnnnnnnnnnnnnnnnnnnnnnnnnnnnnnnnnnnnnnnnnnnnnnnnnnnnnnnnnnnnnnnnnnnnnnnnnnnnnnnnnnnnnnnnnnnnnnnnnnnnnnnnnnnnnnnnnnnnnnnnnnnnnnnnnnnnnnnnnnnnnnnnnnnnnnnnnnnnnnnnnnnnnnnnnnnnnnnnnnnnnnnnnnnnnnnnnnnnnnnnnnnnnnnnnnnnnnnnnnnnnnnnnnnnnnnnnnnnnnnnnnnnnnnnnnnnnnnnnnnnnnnnnnnnnnnnnnnnnnnnnnnnnnnnnnnnnnnnnnnnnnnnnnnnnnnnnnnnnnnnnnnnnnnnnnnnnnnnnnnnnnnnnnnnnnnnnnnnnnnnnnnnnnnnnnnnnnnnnnnnnnnnnnnnnnnnnnnnnnnnnnnnnnnnnnnnnnnnnnnnnnnnnnnnnnnnnnnnnnnnnnnnnnnnnnnnnnnnnnnnnnnnnnnnnnnnnnnnnnnnnnnnnnnnnnnnnnnnnnnnnnnnnnnnnnnnnnnnnnnnnnnnnnnnnnnnnnnnnnnnnnnnnnnnnnnnnnnnnnnnnnnnnnnnnnnnnnnnnnnnnnnnnnnnnnnnnnnnnnnnnnnnnnnnnnnnnnnnnnnnnnnnnnnnnnnnnnnnnnnnnnnnnnnnnnnnnnnnnnnnnnnnnnnnnnnnnnnnnnnnnnnnnnnnnnnnnnnnnnnnnnnnnnnnnnnnnnnnnnnnnnnnnnnnnnnnnnnnnnnnnnnnnnnnnnnnnnnnnnnnnnnnnnnnnnnnnnnnnnnnnnnnnnnnnnnnnnnnnnnnnnnnnnnnnnnnnnnnnnnnnnnnnnnnnnnnnnnnnnnnnnnnnnnnnnnnnnnnnnnnnnnnnnnnnnnnnnnnnnnnnnnnnnnnnnnnnnnnnnnnnnnnnnnnnnnnnnnnnnnnnnnnnnnnnnnnnnnnnnnnnnnnnnnnnnnnnnnnnnnnnnnnnnnnnnnnnnnnnnnnnnnnnnnnnnnnnnnnnnnnnnnnnnnnnnnnnnnnnnnnnnnnnnnnnnnnnnnnnnnnnnnnnnnnnnnnnnnnnnnnnnnnnnnnnnnnnnnnnnnnnnnnnnnnnnnnnnnnnnnnnnnnnnnnnnnnnnnnnnnnnnnnnnnnnnnnnnnnnnnnnnnnnnnnnnnnnnnnnnnnnnnnnnnnnnnnnnnnnnnnnnnnnnnnnnnnnnnnnnnnnnnnnnnnnnnnnnnnnnnnnnnnnnnnnnnnnnnnnnnnnnnnnnnnnnnnnnnnnnnnnnnnnnnnnnnnnnnnnnnnnnnnnnnnnnnnnnnnnnnnnnnnnnnnnnnnnnnnnnnnnnnnnnnnnnnnnnnnnnnnnnnnnnnnnnnnnnnnnnnnnnnnnnnnnnnnnnnnnnnnnnnnnnnnnnnnnnnnnnnnnnnnnnnnnnnnnnnnnnnnnnnnnnnnnnnnnnnnnnnnnnnnnnnnnnnnnnnnnnnnnnnnnnnnnnnnnnnnnnnnnnnnnnnnnnnnnnnnnnnnnnnnnnnnnnnnnnnnnnnnnnnnnnnnnnnnnnnnnnnnnnnnnnnnnnnnnnnnnnnnnnnnnnnnnnnnnnnnnnnnnnnnnnnnnnnnnnnnnnnnnnnnnnnnnnnnnnnnnnnnnnnnnnnnnnnnnnnnnnnnnnnnnnnnnnnnnnnnnnnnnnnnnnnnnnnnnnnnnnnnnnnnnnnnnnnnnnnnnnnnnnnnnnnnnnnnnnnnnnnnnnnnnnnnnnnnnnnnnnnnnnnnnnnnnnnnnnnnnnnnnnnnnnnnnnnnnnnnnnnnnnnnnnnnnnnnnnnnnnnnnnnnnnnnnnnnnnnnnnnnnnnnnnnnnnnnnnnnnnnnnnnnnnnnnnnnnnnnnnnnnnnnnnnnnnnnnnnnnnnnnnnnnnnnnnnnnnnnnnnnnnnnnnnnnnnnnnnnnnnnnnnnnnnnnnnnnnnnnnnnnnnnnnnnnnnnnnnnnnnnnnnnnnnnnnnnnnnnnnnnnnnnnnnnnnnnnnnnnnnnnnnnnnnnnnnnnnnnnnnnnnnnnnnnnnnnnnnnnnnnnnnnnnnnnnnnnnnnnnnnnnnnnnnnnnnnnnnnnnnnnnnnnnnnnnnnnnnnnnnnnnnnnnnnnnnnnnnnnnnnnnnnnnnnnnnnnnnnnnnnnnnnnnnnnnnnnnnnnnnnnnnnnnnnnnnnnnnnnnnnnnnnnnnnnnnnnnnnnnnnnnnnnnnnnnnnnnnnnnnnnnnnnnnnnnnnnnnnnnnnnnnnnnnnnnnnnnnnnnnnnnnnnnnnnnnnnnnnnnnnnnnnnnnnnnnnnnnnnnnnnnnnnnnnnnnnnnnnnnnnnnnnnnnnnnnnnnnnnnnnnnnnnnnnnnnnnnnnnnnnnnnnnnnnnnnnnnnnnnnnnnnnnnnnnnnnnnnnnnnnnnnnnnnnnnnnnnnnnnnnnnnnnnnnnnnnnnnnnnnnnnnnnnnnnnnnnnnnnnnnnnnnnnnnnnnnnnnnnnnnnnnnnnnnnnnnnnnnnnnnnnnnnnnnnnnnnnnnnnnnnnnnnnnnnnnnnnnnnnnnnnnnnnnnnnnnnnnnnnnnnnnnnnnnnnnnnnnnnnnnnnnnnnnnnnnnnnnnnnnnnnnnnnnnnnnnnnnnnnnnnnnnnnnnnnnnnnnnnnnnnnnnnnnnnnnnnnnnnnnnnnnnnnnnnnnnnnnnnnnnnnnnnnnnnnnnnnnnnnnnnnnnnnnnnnnnnnnnnnnnnnnnnnnnnnnnnnnnnnnnnnnnnnnnnnnnnnnnnnnnnnnnnnnnnnnnnnnnnnnnnnnnnnnnnnnnnnnnnnnnnnnnnnnnnnnnnnnnnnnnnnnnnnnnnnnnnnnnnnnnnnnnnnnnnnnnnnnnnnnnnnnnnnnnnnnnnnnnnnnnnnnnnnnnnnnnnnnnnnnnnnnnnnnnnnnnnnnnnnnnnnnnnnnnnnnnnnnnnnnnnnnnnnnnnnnnnnnnnnnnnnnnnnnnnnnnnnnnnnnnnnnnnnnnnnnnnnnnnnnnnnnnnnnnnnnnnnnnnnnnnnnnnnnnnnnnnnnnnnnnnnnnnnnnnnnnnnnnnnnnnnnnnnnnnnnnnnnnnnnnnnnnnnnnnnnnnnnnnnnnnnnnnnnnnnnnnnnnnnnnnnnnnnnnnnnnnnnnnnnnnnnnnnnnnnnnnnnnnnnnnnnnnnnnnnnnnnnnnnnnnnnnnnnnnnnnnnnnnnnnnnnnnnnnnnnnnnnnnnnnnnnnnnnnnnnnnnnnnnnnnnnnnnnnnnnnnnnnnnnnnnnnnnnnnnnnnnnnnnnnnnnnnnnnnnnnnnnnnnnnnnnnnnnnnnnnnnnnnnnnnnnnnnnnnnnnnnnnnnnnnnnnnnnnnnnnnnnnnnnnnnnnnnnnnnnnnnnnnnnnnnnnnnnnnnnnnnnnnnnnnnnnnnnnnnnnnnnnnnnnnnnnnnnnnnnnnnnnnnnnnnnnnnnnnnnnnnnnnnnnnnnnnnnnnnnnnnnnnnnnnnnnnnnnnnnnnnnnnnnnnnnnnnnnnnnnnnnnnnnnnnnnnnnnnnnnnnnnnnnnnnnnnnnnnnnnnnnnnnnnnnnnnnnnnnnnnnnnnnnnnnnnnnnnnnnnnnnnnnnnnnnnnnnnnnnnnnnnnnnnnnnnnnnnnnnnnnnnnnnnnnnnnnnnnnnnnnnnnnnnnnnnnnnnnnnnnnnnnnnnnnnnnnnnnnnnnnnnnnnnnnnnnnnnnnnnnnnnnnnnnnnnnnnnnnnnnnnnnnnnnnnnnnnnnnnnnnnnnnnnnnnnnnnnnnnnnnnnnnnnnnnnnnnnnnnnnnnnnnnnnnnnnnnnnnnnnnnnnnnnnnnnnnnnnnnnnnnnnnnnnnnnnnnnnnnnnnnnnnnnnnnnnnnnnnnnnnnnnnnnnnnnnnnnnnnnnnnnnnnnnnnnnnnnnnnnnnnnnnnnnnnnnnnnnnnnnnnnnnnnnnnnnnnnnnnnnnnnnnnnnnnnnnnnnnnnnnnnnnnnnnnnnnnnnnnnnnnnnnnnnnnnnnnnnnnnnnnnnnnnnnnnnnnnnnnnnnnnnnnnnnnnnnnnnnnnnnnnnnnnnnnnnnnnnnnnnnnnnnnnnnnnnnnnnnnnnnnnnnnnnnnnnnnnnnnnnnnnnnnnnnnnnnnnnnnnnnnnnnnnnnnnnnnnnnnnnnnnnnnnnnnnnnnnnnnnnnnnnnnnnnnnnnnnnnnnnnnnnnnnnnnnnnnnnnnnnnnnnnnnnnnnnnnnnnnnnnnnnnnnnnnnnnnnnnnnnnnnnnnnnnnnnnnnnnnnnnnnnnnnnnnnnnnnnnnnnnnnnnnnnnnnnnnnnnnnnnnnnnnnnnnnnnnnnnnnnnnnnnnnnnnnnnnnnnnnnnnnnnnnnnnnnnnnnnnnnnnnnnnnnnnnnnnnnnnnnnnnnnnnnnnnnnnnnnnnnnnnnnnnnnnnnnnnnnnnnnnnnnnnnnnnnnnnnnnnnnnnnnnnnnnnnnnnnnnnnnnnnnnnnnnnnnnnnnnnnnnnnnnnnnnnnnnnnnnnnnnnnnnnnnnnnnnnnnnnnnnnnnnnnnnnnnnnnnnnnnnnnnnnnnnnnnnnnnnnnnnnnnnnnnnnnnnnnnnnnnnnnnnnnnnnnnnnnnnnnnnnnnnnnnnnnnnnnnnnnnnnnnnnnnnnnnnnnnnnnnnnnnnnnnnnnnnnnnnnnnnnnnnnnnnnnnnnnnnnnnnnnnnnnnnnnnnnnnnnnnnnnnnnnnnnnnnnnnnnnnnnnnnnnnnnnnnnnnnnnnnnnnnnnnnnnnnnnnnnnnnnnnnnnnnnnnnnnnnnnnnnnnnnnnnnnnnnnnnnnnnnnnnnnnnnnnnnnnnnnnnnnnnnnnnnnnnnnnnnnnnnnnnnnnnnnnnnnnnnnnnnnnnnnnnnnnnnnnnnnnnnnnnnnnnnnnnnnnnnnnnnnnnnnnnnnnnnnnnnnnnnnnnnnnnnnnnnnnnnnnnnnnnnnnnnnnnnnnnnnnnnnnnnnnnnnnnnnnnnnnnnnnnnnnnnnnnnnnnnnnnnnnnnnnnnnnnnnnnnnnnnnnnnnnnnnnnnnnnnnnnnnnnnnnnnnnnnnnnnnnnnnnnnnnnnnnnnnnnnnnnnnnnnnnnnnnnnnnnnnnnnnnnnnnnnnnnnnnnnnnnnnnnnnnnnnnnnnnnnnnnnnnnnnnnnnnnnnnnnnnnnnnnnnnnnnnnnnnnnnnnnnnnnnnnnnnnnnnnnnnnnnnnnnnnnnnnnnnnnnnnnnnnnnnnnnnnnnnnnnnnnnnnnnnnnnnnnnnnnnnnnnnnnnnnnnnnnnnnnnnnnnnnnnnnnnnnnnnnnnnnnnnnnnnnnnnnnnnnnnnnnnnnnnnnnnnnnnnnnnnnnnnnnnnnnnnnnnnnnnnnnnnnnnnnnnnnnnnnnnnnnnnnnnnnnnnnnnnnnnnnnnnnnnnnnnnnnnnnnnnnnnnnnnnnnnnnnnnnnnnnnnnnnnnnnnnnnnnnnnnnnnnnnnnnnnnnnnnnnnnnnnnnnnnnnnnnnnnnnnnnnnnnnnnnnnnnnnnnnnnnnnnnnnnnnnnnnnnnnnnnnnnnnnnnnnnnnnnnnnnnnnnnnnnnnnnnnnnnnnnnnnnnnnnnnnnnnnnnnnnnnnnnnnnnnnnnnnnnnnnnnnnnnnnnnnnnnnnnnnnnnnnnnnnnnnnnnnnnnnnnnnnnnnnnnnnnnnnnnnnnnnnnnnnnnnnnnnnnnnnnnnnnnnnnnnnnnnnnnnnnnnnnnnnnnnnnnnnnnnnnnnnnnnnnnnnnnnnnnnnnnnnnnnnnnnnnnnnnnnnnnnnnnnnnnnnnnnnnnnnnnnnnnnnnnnnnnnnnnnnnnnnnnnnnnnnnnnnnnnnnnnnnnnnnnnnnnnnnnnnnnnnnnnnnnnnnnnnnnnnnnnnnnnnnnnnnnnnnnnnnnnnnnnnnnnnnnnnnnnnnnnnnnnnnnnnnnnnnnnnnnnnnnnnnnnnnnnnnnnnnnnnnnnnnnnnnnnnnnnnnnnnnnnnnnnnnnnnnnnnnnnnnnnnnnnnnnnnnnnnnnnnnnnnnnnnnnnnnnnnnnnnnnnnnnnnnnnnnnnnnnnnnnnnnnnnnnnnnnnnnnnnnnnnnnnnnnnnnnnnnnnnnnnnnnnnnnnnnnnnnnnnnnnnnnnnnnnnnnnnnnnnnnnnnnnnnnnnnnnnnnnnnnnnnnnnnnnnnnnnnnnnnnnnnnnnnnnnnnnnnnnnnnnnnnnnnnnnnnnnnnnnnnnnnnnnnnnnnnnnnnnnnnnnnnnnnnnnnnnnnnnnnnnnnnnnnnnnnnnnnnnnnnnnnnnnnnnnnnnnnnnnnnnnnnnnnnnnnnnnnnnnnnnnnnnnnnnnnnnnnnnnnnnnnnnnnnnnnnnnnnnnnnnnnnnnnnnnnnnnnnnnnnnnnnnnnnnnnnnnnnnnnnnnnnnnnnnnnnnnnnnnnnnnnnnnnnnnnnnnnnnnnnnnnnnnnnnnnnnnnnnnnnnnnnnnnnnnnnnnnnnnnnnnnnnnnnnnnnnnnnnnnnnnnnnnnnnnnnnnnnnnnnnnnnnnnnnnnnnnnnnnnnnnnnnnnnnnnnnnnnnnnnnnnnnnnnnnnnnnnnnnnnnnnnnnnnnnnnnnnnnnnnnnnnnnnnnnnnnnnnnnnnnnnnnnnnnnnnnnnnnnnnnnnnnnnnnnnnnnnnnnnnnnnnnnnnnnnnnnnnnnnnnnnnnnnnnnnnnnnnnnnnnnnnnnnnnnnnnnnnnnnnnnnnnnnnnnnnnnnnnnnnnnnnnnnnnnnnnnnnnnnnnnnnnnnnnnnnnnnnnnnnnnnnnnnnnnnnnnnnnnnnnnnnnnnnnnnnnnnnnnnnnnnnnnnnnnnnnnnnnnnnnnnnnnnnnnnnnnnnnnnnnnnnnnnnnnnnnnnnnnnnnnnnnnnnnnnnnnnnnnnnnnnnnnnnnnnnnnnnnnnnnnnnnnnnnnnnnnnnnnnnnnnnnnnnnnnnnnnnnnnnnnnnnnnnnnnnnnnnnnnnnnnnnnnnnnnnnnnnnnnnnnnnnnnnnnnnnnnnnnnnnnnnnnnnnnnnnnnnnnnnnnnnnnnnnnnnnnnnnnnnnnnnnnnnnnnnnnnnnnnnnnnnnnnnnnnnnnnnnnnnnnnnnnnnnnnnnnnnnnnnnnnnnnnnnnnnnnnnnnnnnnnnnnnnnnnnnnnnnnnnnnnnnnnnnnnnnnnnnnnnnnnnnnnnnnnnnnnnnnnnnnnnnnnnnnnnnnnnnnnnnnnnnnnnnnnnnnnnnnnnnnnnnnnnnnnnnnnnnnnnnnnnnnnnnnnnnnnnnnnnnnnnnnnnnnnnnnnnnnnnnnnnnnnnnnnnnnnnnnnnnnnnnnnnnnnnnnnnnnnnnnnnnnnnnnnnnnnnnnnnnnnnnnnnnnnnnnnnnnnnnnnnnnnnnnnnnnnnnnnnnnnnnnnnnnnnnnnnnnnnnnnnnnnnnnnnnnnnnnnnnnnnnnnnnnnnnnnnnnnnnnnnnnnnnnnnnnnnnnnnnnnnnnnnnnnnnnnnnnnnnnnnnnnnnnnnnnnnnnnnnnnnnnnnnnnnnnnnnnnnnnnnnnnnnnnnnnnnnnnnnnnnnnnnnnnnnnnnnnnnnnnnnnnnnnnnnnnnnnnnnnnnnnnnnnnnnnnnnnnnnnnnnnnnnnnnnnnnnnnnnnnnnnnnnnnnnnnnnnnnnnnnnnnnnnnnnnnnnnnnnnnnnnnnnnnnnnnnnnnnnnnnnnnnnnnnnnnnnnnnnnnnnnnnnnnnnnnnnnnnnnnnnnnnnnnnnnnnnnnnnnnnnnnnnnnnnnnnnnnnnnnnnnnnnnnnnnnnnnnnnnnnnnnnnnnnnnnnnnnnnnnnnnnnnnnnnnnnnnnnnnnnnnnnnnnnnnnnnnnnnnnnnnnnnnnnnnnnnnnnnnnnnnnnnnnnnnnnnnnnnnnnnnnnnnnnnnnnnnnnnnnnnnnnnnnnnnnnnnnnnnnnnnnnnnnnnnnnnnnnnnnnnnnnnnnnnnnnnnnnnnnnnnnnnnnnnnnnnnnnnnnnnnnnnnnnnnnnnnnnnnnnnnnnnnnnnnnnnnnnnnnnnnnnnnnnnnnnnnnnnnnnnnnnnnnnnnnnnnnnnnnnnnnnnnnnnnnnnnnnnnnnnnnnnnnnnnnnnnnnnnnnnnnnnnnnnnnnnnnnnnnnnnnnnnnnnnnnnnnnnnnnnnnnnnnnnnnnnnnnnnnnnnnnnnnnnnnnnnnnnnnnnnnnnnnnnnnnnnnnnnnnnnnnnnnnnnnnnnnnnnnnnnnnnnnnnnnnnnnnnnnnnnnnnnnnnnnnnnnnnnnnnnnnnnnnnnnnnnnnnnnnnnnnnnnnnnnnnnnnnnnnnnnnnnnnnnnnnnnnnnnnnnnnnnnnnnnnnnnnnnnnnnnnnnnnnnnnnnnnnnnnnnnnnnnnnnnnnnnnnnnnnnnnnnnnnnnnnnnnnnnnnnnnnnnnnnnnnnnnnnnnnnnnnnnnnnnnnnnnnnnnnnnnnnnnnnnnnnnnnnnnnnnnnnnnnnnnnnnnnnnnnnnnnnnnnnnnnnnnnnnnnnnnnnnnnnnnnnnnnnnnnnnnnnnnnnnnnnnnnnnnnnnnnnnnnnnnnnnnnnnnnnnnnnnnnnnnnnnnnnnnnnnnnnnnnnnnnnnnnnnnnnnnnnnnnnnnnnnnnnnnnnnnnnnnnnnnnnnnnnnnnnnnnnnnnnnnnnnnnnnnnnnnnnnnnnnnnnnnnnnnnnnnnnnnnnnnnnnnnnnnnnnnnnnnnnnnnnnnnnnnnnnnnnnnnnnnnnnnnnnnnnnnnnnnnnnnnnnnnnnnnnnnnnnnnnnnnnnnnnnnnnnnnnnnnnnnnnnnnnnnnnnnnnnnnnnnnnnnnnnnnnnnnnnnnnnnnnnnnnnnnnnnnnnnnnnnnnnnnnnnnnnnnnnnnnnnnnnnnnnnnnnnnnnnnnnnnnnnnnnnnnnnnnnnnnnnnnnnnnnnnnnnnnnnnnnnnnnnnnnnnnnnnnnnnnnnnnnnnnnnnnnnnnnnnnnnnnnnnnnnnnnnnnnnnnnnnnnnnnnnnnnnnnnnnnnnnnnnnnnnnnnnnnnnnnnnnnnnnnnnnnnnnnnnnnnnnnnnnnnnnnnnnnnnnnnnnnnnnnnnnnnnnnnnnnnnnnnnnnnnnnnnnnnnnnnnnnnnnnnnnnnnnnnnnnnnnnnnnnnnnnnnnnnnnnnnnnnnnnnnnnnnnnnnnnnnnnnnnnnnnnnnnnnnnnnnnnnnnnnnnnnnnnnnnnnnnnnnnnnnnnnnnnnnnnnnnnnnnnnnnnnnnnnnnnnnnnnnnnnnnnnnnnnnnnnnnnnnnnnnnnnnnnnnnnnnnnnnnnnnnnnnnnnnnnnnnnnnnnnnnnnnnnnnnnnnnnnnnnnnnnnnnnnnnnnnnnnnnnnnnnnnnnnnnnnnnnnnnnnnnnnnnnnnnnnnnnnnnnnnnnnnnnnnnnnnnnnnnnnnnnnnnnnnnnnnnnnnnnnnnnnnnnnnnnnnnnnnnnnnnnnnnnnnnnnnnnnnnnnnnnnnnnnnnnnnnnnnnnnnnnnnnnnnnnnnnnnnnnnnnnnnnnnnnnnnnnnnnnnnnnnnnnnnnnnnnnnnnnnnnnnnnnnnnnnnnnnnnnnnnnnnnnnnnnnnnnnnnnnnnnnnnnnnnnnnnnnnnnnnnnnnnnnnnnnnnnnnnnnnnnnnnnnnnnnnnnnnnnnnnnnnnnnnnnnnnnnnnnnnnnnnnnnnnnnnnnnnnnnnnnnnnnnnnnnnnnnnnnnnnnnnnnnnnnnnnnnnnnnnnnnnnnnnnnnnnnnnnnnnnnnnnnnnnnnnnnnnnnnnnnnnnnnnnnnnnnnnnnnnnnnnnnnnnnnnnnnnnnnnnnnnnnnnnnnnnnnnnnnnnnnnnnnnnnnnnnnnnnnnnnnnnnnnnnnnnnnnnnnnnnnnnnnnnnnnnnnnnnnnnnnnnnnnnnnnnnnnnnnnnnnnnnnnnnnnnnnnnnnnnnnnnnnnnnnnnnnnnnnnnnnnnnnnnnnnnnnnnnnnnnnnnnnnnnnnnnnnnnnnnnnnnnnnnnnnnnnnnnnnnnnnnnnnnnnnnnnnnnnnnnnnnnnnnnnnnnnnnnnnnnnnnnnnnnnnnnnnnnnnnnnnnnnnnnnnnnnnnnnnnnnnnnnnnnnnnnnnnnnnnnnnnnnnnnnnnnnnnnnnnnnnnnnnnnnnnnnnnnnnnnnnnnnnnnnnnnnnnnnnnnnnnnnnnnnnnnnnnnnnnnnnnnnnnnnnnnnnnnnnnnnnnnnnnnnnnnnnnnnnnnnnnnnnnnnnnnnnnnnnnnnnnnnnnnnnnnnnnnnnnnnnnnnnnnnnnnnnnnnnnnnnnnnnnnnnnnnnnnnnnnnnnnnnnnnnnnnnnnnnnnnnnnnnnnnnnnnnnnnnnnnnnnnnnnnnnnnnnnnnnnnnnnnnnnnnnnnnnnnnnnnnnnnnnnnnnnnnnnnnnnnnnnnnnnnnnnnnnnnnnnnnnnnnnnnnnnnnnnnnnnnnnnnnnnnnnnnnnnnnnnnnnnnnnnnnnnnnnnnnnnnnnnnnnnnnnnnnnnnnnnnnnnnnnnnnnnnnnnnnnnnnnnnnnnnnnnnnnnnnnnnnnnnnnnnnnnnnnnnnnnnnnnnnnnnnnnnnnnnnnnnnnnnnnnnnnnnnnnnnnnnnnnnnnnnnnnnnnnnnnnnnnnnnnnnnnnnnnnnnnnnnnnnnnnnnnnnnnnnnnnnnnnnnnnnnnnnnnnnnnnnnnnnnnnnnnnnnnnnnnnnnnnnnnnnnnnnnnnnnnnnnnnnnnnnnnnnnnnnnnnnnnnnnnnnnnnnnnnnnnnnnnnnnnnnnnnnnnnnnnnnnnnnnnnnnnnnnnnnnnnnnnnnnnnnnnnnnnnnnnnnnnnnnnnnnnnnnnnnnnnnnnnnnnnnnnnnnnnnnnnnnnnnnnnnnnnnnnnnnnnnnnnnnnnnnnnnnnnnnnnnnnnnnnnnnnnnnnnnnnnnnnnnnnnnnnnnnnnnnnnnnnnnnnnnnnnnnnnnnnnnnnnnnnnnnnnnnnnnnnnnnnnnnnnnnnnnnnnnnnnnnnnnnnnnnnnnnnnnnnnnnnnnnnnnnnnnnnnnnnnnnnnnnnnnnnnnnnnnnnnnnnnnnnnnnnnnnnnnnnnnnnnnnnnnnnnnnnnnnnnnnnnnnnnnnnnnnnnnnnnnnnnnnnnnnnnnnnnnnnnnnnnnnnnnnnnnnnnnnnnnnnnnnnnnnnnnnnnnnnnnnnnnnnnnnnnnnnnnnnnnnnnnnnnnnnnnnnnnnnnnnnnnnnnnnnnnnnnnnnnnnnnnnnnnnnnnnnnnnnnnnnnnnnnnnnnnnnnnnnnnnnnnnnnnnnnnnnnnnnnnnnnnnnnnnnnnnnnnnnnnnnnnnnnnnnnnnnnnnnnnnnnnnnnnnnnnnnnnnnnnnnnnnnnnnnnnnnnnnnnnnnnnnnnnnnnnnnnnnnnnnnnnnnnnnnnnnnnnnnnnnnnnnnnnnnnnnnnnnnnnnnnnnnnnnnnnnnnnnnnnnnnnnnnnnnnnnnnnnnnnnnnnnnnnnnnnnnnnnnnnnnnnnnnnnnnnnnnnnnnnnnnnnnnnnnnnnnnnnnnnnnnnnnnnnnnnnnnnnnnnnnnnnnnnnnnnnnnnnnnnnnnnnnnnnnnnnnnnnnnnnnnnnnnnnnnnnnnnnnnnnnnnnnnnnnnnnnnnnnnnnnnnnnnnnnnnnnnnnnnnnnnnnnnnnnnnnnnnnnnnnnnnnnnnnnnnnnnnnnnnnnnnnnnnnnnnnnnnnnnnnnnnnnnnnnnnnnnnnnnnnnnnnnnnnnnnnnnnnnnnnnnnnnnnnnnnnnnnnnnnnnnnnnnnnnnnnnnnnnnnnnnnnnnnnnnnnnnnnnnnnnnnnnnnnnnnnnnnnnnnnnnnnnnnnnnnnnnnnnnnnnnnnnnnnnnnnnnnnnnnnnnnnnnnnnnnnnnnnnnnnnnnnnnnnnnnnnnnnnnnnnnnnnnnnnnnnnnnnnnnnnnnnnnnnnnnnnnnnnnnnnnnnnnnnnnnnnnnnnnnnnnnnnnnnnnnnnnnnnnnnnnnnnnnnnnnnnnnnnnnnnnnnnnnnnnnnnnnnnnnnnnnnnnnnnnnnnnnnnnnnnnnnnnnnnnnnnnnnnnnnnnnnnnnnnnnnnnnnnnnnnnnnnnnnnnnnnnnnnnnnnnnnnnnnnnnnnnnnnnnnnnnnnnnnnnnnnnnnnnnnnnnnnnnnnnnnnnnnnnnnnnnnnnnnnnnnnnnnnnnnnnnnnnnnnnnnnnnnnnnnnnnnnnnnnnnnnnnnnnnnnnnnnnnnnnnnnnnnnnnnnnnnnnnnnnnnnnnnnnnnnnnnnnnnnnnnnnnnnnnnnnnnnnnnnnnnnnnnnnnnnnnnnnnnnnnnnnnnnnnnnnnnnnnnnnnnnnnnnnnnnnnnnnnnnnnnnnnnnnnnnnnnnnnnnnnnnnnnnnnnnnnnnnnnnnnnnnnnnnnnnnnnnnnnnnnnnnnnnnnnnnnnnnnnnnnnnnnnnnnnnnnnnnnnnnnnnnnnnnnnnnnnnnnnnnnnnnnnnnnnnnnnnnnnnnnnnnnnnnnnnnnnnnnnnnnnnnnnnnnnnnnnnnnnnnnnnnnnnnnnnnnnnnnnnnnnnnnnnnnnnnnnnnnnnnnnnnnnnnnnnnnnnnnnnnnnnnnnnnnnnnnnnnnnnnnnnnnnnnnnnnnnnnnnnnnnnnnnnnnnnnnnnnnnnnnnnnnnnnnnnnnnnnnnnnnnnnnnnnnnnnnnnnnnnnnnnnnnnnnnnnnnnnnnnnnnnnnnnnnnnnnnnnnnnnnnnnnnnnnnnnnnnnnnnnnnnnnnnnnnnnnnnnnnnnnnnnnnnnnnnnnnnnnnnnnnnnnnnnnnnnnnnnnnnnnnnnnnnnnnnnnnnnnnnnnnnnnnnnnnnnnnnnnnnnnnnnnnnnnnnnnnnnnnnnnnnnnnnnnnnnnnnnnnnnnnnnnnnnnnnnnnnnnnnnnnnnnnnnnnnnnnnnnnnnnnnnnnnnnnnnnnnnnnnnnnnnnnnnnnnnnnnnnnnnnnnnnnnnnnnnnnnnnnnnnnnnnnnnnnnnnnnnnnnnnnnnnnnnnnnnnnnnnnnnnnnnnnnnnnnnnnnnnnnnnnnnnnnnnnnnnnnnnnnnnnnnnnnnnnnnnnnnnnnnnnnnnnnnnnnnnnnnnnnnnnnnnnnnnnnnnnnnnnnnnnnnnnnnnnnnnnnnnnnnnnnnnnnnnnnnnnnnnnnnnnnnnnnnnnnnnnnnnnnnnnnnnnnnnnnnnnnnnnnnnnnnnnnnnnnnnnnnnnnnnnnnnnnnnnnnnnnnnnnnnnnnnnnnnnnnnnnnnnnnnnnnnnnnnnnnnnnnnnnnnnnnnnnnnnnnnnnnnnnnnnnnnnnnnnnnnnnnnnnnnnnnnnnnnnnnnnnnnnnnnnnnnnnnnnnnnnnnnnnnnnnnnnnnnnnnnnnnnnnnnnnnnnnnnnnnnnnnnnnnnnnnnnnnnnnnnnnnnnnnnnnnnnnnnnnnnnnnnnnnnnnnnnnnnnnnnnnnnnnnnnnnnnnnnnnnnnnnnnnnnnnnnnnnnnnnnnnnnnnnnnnnnnnnnnnnnnnnnnnnnnnnnnnnnnnnnnnnnnnnnnnnnnnnnnnnnnnnnnnnnnnnnnnnnnnnnnnnnnnnnnnnnnnnnnnnnnnnnnnnnnnnnnnnnnnnnnnnnnnnnnnnnnnnnnnnnnnnnnnnnnnnnnnnnnnnnnnnnnnnnnnnnnnnnnnnnnnnnnnnnnnnnnnnnnnnnnnnnnnnnnnnnnnnnnnnnnnnnnnnnnnnnnnnnnnnnnnnnnnnnnnnnnnnnnnnnnnnnnnnnnnnnnnnnnnnnnnnnnnnnnnnnnnnnnnnnnnnnnnnnnnnnnnnnnnnnnnnnnnnnnnnnnnnnnnnnnnnnnnnnnnnnnnnnnnnnnnnnnnnnnnnnnnnnnnnnnnnnnnnnnnnnnnnnnnnnnnnnnnnnnnnnnnnnnnnnnnnnnnnnnnnnnnnnnnnnnnnnnnnnnnnnnnnnnnnnnnnnnnnnnnnnnnnnnnnnnnnnnnnnnnnnnnnnnnnnnnnnnnnnnnnnnnnnnnnnnnnnnnnnnnnnnnnnnnnnnnnnnnnnnnnnnnnnnnnnnnnnnnnnnnnnnnnnnnnnnnnnnnnnnnnnnnnnnnnnnnnnnnnnnnnnnnnnnnnnnnnnnnnnnnnnnnnnnnnnnnnnnnnnnnnnnnnnnnnnnnnnnnnnnnnnnnnnnnnnnnnnnnnnnnnnnnnnnnnnnnnnnnnnnnnnnnnnnnnnnnnnnnnnnnnnnnnnnnnnnnnnnnnnnnnnnnnnnnnnnnnnnnnnnnnnnnnnnnnnnnnnnnnnnnnnnnnnnnnnnnnnnnnnnnnnnnnnnnnnnnnnnnnnnnnnnnnnnnnnnnnnnnnnnnnnnnnnnnnnnnnnnnnnnnnnnnnnnnnnnnnnnnnnnnnnnnnnnnnnnnnnnnnnnnnnnnnnnnnnnnnnnnnnnnnnnnnnnnnnnnnnnnnnnnnnnnnnnnnnnnnnnnnnnnnnnnnnnnnnnnnnnnnnnnnnnnnnnnnnnnnnnnnnnnnnnnnnnnnnnnnnnnnnnnnnnnnnnnnnnnnnnnnnnnnnnnnnnnnnnnnnnnnnnnnnnnnnnnnnnnnnnnnnnnnnnnnnnnnnnnnnnnnnnnnnnnnnnnnnnnnnnnnnnnnnnnnnnnnnnnnnnnnnnnnnnnnnnnnnnnnnnnnnnnnnnnnnnnnnnnnnnnnnnnnnnnnnnnnnnnnnnnnnnnnnnnnnnnnnnnnnnnnnnnnnnnnnnnnnnnnnnnnnnnnnnnnnnnnnnnnnnnnnnnnnnnnnnnnnnnnnnnnnnnnnnnnnnnnnnnnnnnnnnnnnnnnnnnnnnnnnnnnnnnnnnnnnnnnnnnnnnnnnnnnnnnnnnnnnnnnnnnnnnnnnnnnnnnnnnnnnnnnnnnnnnnnnnnnnnnnnnnnnnnnnnnnnnnnnnnnnnnnnnnnnnnnnnnnnnnnnnnnnnnnnnnnnnnnnnnnnnnnnnnnnnnnnnnnnnnnnnnnnnnnnnnnnnnnnnnnnnnnnnnnnnnnnnnnnnnnnnnnnnnnnnnnnnnnnnnnnnnnnnnnnnnnnnnnnnnnnnnnnnnnnnnnnnnnnnnnnnnnnnnnnnnnnnnnnnnnnnnnnnnnnnnnnnnnnnnnnnnnnnnnnnnnnnnnnnnnnnnnnnnnnnnnnnnnnnnnnnnnnnnnnnnnnnnnnnnnnnnnnnnnnnnnnnnnnnnnnnnnnnnnnnnnnnnnnnnnnnnnnnnnnnnnnnnnnnnnnnnnnnnnnnnnnnnnnnnnnnnnnnnnnnnnnnnnnnnnnnnnnnnnnnnnnnnnnnnnnnnnnnnnnnnnnnnnnnnnnnnnnnnnnnnnnnnnnnnnnnnnnnnnnnnnnnnnnnnnnnnnnnnnnnnnnnnnnnnnnnnnnnnnnnnnnnnnnnnnnnnnnnnnnnnnnnnnnnnnnnnnnnnnnnnnnnnnnnnnnnnnnnnnnnnnnnnnnnnnnnnnnnnnnnnnnnnnnnnnnnnnnnnnnnnnnnnnnnnnnnnnnnnnnnnnnnnnnnnnnnnnnnnnnnnnnnnnnnnnnnnnnnnnnnnnnnnnnnnnnnnnnnnnnnnnnnnnnnnnnnnnnnnnnnnnnnnnnnnnnnnnnnnnnnnnnnnnnnnnnnnnnnnnnnnnnnnnnnnnnnnnnnnnnnnnnnnnnnnnnnnnnnnnnnnnnnnnnnnnnnnnnnnnnnnnnnnnnnnnnnnnnnnnnnnnnnnnnnnnnnnnnnnnnnnnnnnnnnnnnnnnnnnnnnnnnnnnnnnnnnnnnnnnnnnnnnnnnnnnnnnnnnnnnnnnnnnnnnnnnnnnnnnnnnnnnnnnnnnnnnnnnnnnnnnnnnnnnnnnnnnnnnnnnnnnnnnnnnnnnnnnnnnnnnnnnnnnnnnnnnnnnnnnnnnnnnnnnnnnnnnnnnnnnnnnnnnnnnnnnnnnnnnnnnnnnnnnnnnnnnnnnnnnnnnnnnnnnnnnnnnnnnnnnnnnnnnnnnnnnnnnnnnnnnnnnnnnnnnnnnnnnnnnnnnnnnnnnnnnnnnnnnnnnnnnnnnnnnnnnnnnnnnnnnnnnnnnnnnnnnnnnnnnnnnnnnnnnnnnnnnnnnnnnnnnnnnnnnnnnnnnnnnnnnnnnnnnnnnnnnnnnnnnnnnnnnnnnnnnnnnnnnnnnnnnnnnnnnnnnnnnnnnnnnnnnnnnnnnnnnnnnnnnnnnnnnnnnnnnnnnnnnnnnnnnnnnnnnnnnnnnnnnnnnnnnnnnnnnnnnnnnnnnnnnnnnnnnnnnnnnnnnnnnnnnnnnnnnnnnnnnnnnnnnnnnnnnnnnnnnnnnnnnnnnnnnnnnnnnnnnnnnnnnnnnnnnnnnnnnnnnnnnnnnnnnnnnnnnnnnnnnnnnnnnnnnnnnnnnnnnnnnnnnnnnnnnnnnnnnnnnnnnnnnnnnnnnnnnnnnnnnnnnnnnnnnnnnnnnnnnnnnnnnnnnnnnnnnnnnnnnnnnnnnnnnnnnnnnnnnnnnnnnnnnnnnnnnnnnnnnnnnnnnnnnnnnnnnnnnnnnnnnnnnnnnnnnnnnnnnnnnnnnnnnnnnnnnnnnnnnnnnnnnnnnnnnnnnnnnnnnnnnnnnnnnnnnnnnnnnnnnnnnnnnnnnnnnnnnnnnnnnnnnnnnnnnnnnnnnnnnnnnnnnnnnnnnnnnnnnnnnnnnnnnnnnnnnnnnnnnnnnnnnnnnnnnnnnnnnnnnnnnnnnnnnnnnnnnnnnnnnnnnnnnnnnnnnnnnnnnnnnnnnnnnnnnnnnnnnnnnnnnnnnnnnnnnnnnnnnnnnnnnnnnnnnnnnnnnnnnnnnnnnnnnnnnnnnnnnnnnnnnnnnnnnnnnnnnnnnnnnnnnnnnnnnnnnnnnnnnnnnnnnnnnnnnnnnnnnnnnnnnnnnnnnnnnnnnnnnnnnnnnnnnnnnnnnnnnnnnnnnnnnnnnnnnnnnnnnnnnnnnnnnnnnnnnnnnnnnnnnnnnnnnnnnnnnnnnnnnnnnnnnnnnnnnnnnnnnnnnnnnnnnnnnnnnnnnnnnnnnnnnnnnnnnnnnnnnnnnnnnnnnnnnnnnnnnnnnnnnnnnnnnnnnnnnnnnnnnnnnnnnnnnnnnnnnnnnnnnnnnnnnnnnnnnnnnnnnnnnnnnnnnnnnnnnnnnnnnnnnnnnnnnnnnnnnnnnnnnnnnnnnnnnnnnnnnnnnnnnnnnnnnnnnnnnnnnnnnnnnnnnnnnnnnnnnnnnnnnnnnnnnnnnnnnnnnnnnnnnnnnnnnnnnnnnnnnnnnnnnnnnnnnnnnnnnnnnnnnnnnnnnnnnnnnnnnnnnnnnnnnnnnnnnnnnnnnnnnnnnnnnnnnnnnnnnnnnnnnnnnnnnnnnnnnnnnnnnnnnnnnnnnnnnnnnnnnnnnnnnnnnnnnnnnnnnnnnnnnnnnnnnnnnnnnnnnnnnnnnnnnnnnnnnnnnnnnnnnnnnnnnnnnnnnnnnnnnnnnnnnnnnnnnnnnnnnnnnnnnnnnnnnnnnnnnnnnnnnnnnnnnnnnnnnnnnnnnnnnnnnnnnnnnnnnnnnnnnnnnnnnnnnnnnnnnnnnnnnnnnnnnnnnnnnnnnnnnnnnnnnnnnnnnnnnnnnnnnnnnnnnnnnnnnnnnnnnnnnnnnnnnnnnnnnnnnnnnnnnnnnnnnnnnnnnnnnnnnnnnnnnnnnnnnnnnnnnnnnnnnnnnnnnnnnnnnnnnnnnnnnnnnnnnnnnnnnnnnnnnnnnnnnnnnnnnnnnnnnnnnnnnnnnnnnnnnnnnnnnnnnnnnnnnnnnnnnnnnnnnnnnnnnnnnnnnnnnnnnnnnnnnnnnnnnnnnnnnnnnnnnnnnnnnnnnnnnnnnnnnnnnnnnnnnnnnnnnnnnnnnnnnnnnnnnnnnnnnnnnnnnnnnnnnnnnnnnnnnnnnnnnnnnnnnnnnnnnnnnnnnnnnnnnnnnnnnnnnnnnnnnnnnnnnnnnnnnnnnnnnnnnnnnnnnnnnnnnnnnnnnnnnnnnnnnnnnnnnnnnnnnnnnnnnnnnnnnnnnnnnnnnnnnnnnnnnnnnnnnnnnnnnnnnnnnnnnnnnnnnnnnnnnnnnnnnnnnnnnnnnnnnnnnnnnnnnnnnnnnnnnnnnnnnnnnnnnnnnnnnnnnnnnnnnnnnnnnnnnnnnnnnnnnnnnnnnnnnnnnnnnnnnnnnnnnnnnnnnnnnnnnnnnnnnnnnnnnnnnnnnnnnnnnnnnnnnnnnnnnnnnnnnnnnnnnnnnnnnnnnnnnnnnnnnnnnnnnnnnnnnnnnnnnnnnnnnnnnnnnnnnnnnnnnnnnnnnnnnnnnnnnnnnnnnnnnnnnnnnnnnnnnnnnnnnnnnnnnnnnnnnnnnnnnnnnnnnnnnnnnnnnnnnnnnnnnnnnnnnnnnnnnnnnnnnnnnnnnnnnnnnnnnnnnnnnnnnnnnnnnnnnnnnnnnnnnnnnnnnnnnnnnnnnnnnnnnnnnnnnnnnnnnnnnnnnnnnnnnnnnnnnnnnnnnnnnnnnnnnnnnnnnnnnnnnnnnnnnnnnnnnnnnnnnnnnnnnnnnnnnnnnnnnnnnnnnnnnnnnnnnnnnnnnnnnnnnnnnnnnnnnnnnnnnnnnnnnnnnnnnnnnnnnnnnnnnnnnnnnnnnnnnnnnnnnnnnnnnnnnnnnnnnnnnnnnnnnnnnnnnnnnnnnnnnnnnnnnnnnnnnnnnnnnnnnnnnnnnnnnnnnnnnnnnnnnnnnnnnnnnnnnnnnnnnnnnnnnnnnnnnnnnnnnnnnnnnnnnnnnnnnnnnnnnnnnnnnnnnnnnnnnnnnnnnnnnnnnnnnnnnnnnnnnnnnnnnnnnnnnnnnnnnnnnnnnnnnnnnnnnnnnnnnnnnnnnnnnnnnnnnnnnnnnnnnnnnnnnnnnnnnnnnnnnnnnnnnnnnnnnnnnnnnnnnnnnnnnnnnnnnnnnnnnnnnnnnnnnnnnnnnnnnnnnnnnnnnnnnnnnnnnnnnnnnnnnnnnnnnnnnnnnnnnnnnnnnnnnnnnnnnnnnnnnnnnnnnnnnnnnnnnnnnnnnnnnnnnnnnnnnnnnnnnnnnnnnnnnnnnnnnnnnnnnnnnnnnnnnnnnnnnnnnnnnnnnnnnnnnnnnnnnnnnnnnnnnnnnnnnnnnnnnnnnnnnnnnnnnnnnnnnnnnnnnnnnnnnnnnnnnnnnnnnnnnnnnnnnnnnnnnnnnnnnnnnnnnnnnnnnnnnnnnnnnnnnnnnnnnnnnnnnnnnnnnnnnnnnnnnnnnnnnnnnnnnnnnnnnnnnnnnnnnnnnnnnnnnnnnnnnnnnnnnnnnnnnnnnnnnnnnnnnnnnnnnnnnnnnnnnnnnnnnnnnnnnnnnnnnnnnnnnnnnnnnnnnnnnnnnnnnnnnnnnnnnnnnnnnnnnnnnnnnnnnnnnnnnnnnnnnnnnnnnnnnnnnnnnnnnnnnnnnnnnnnnnnnnnnnnnnnnnnnnnnnnnnnnnnnnnnnnnnnnnnnnnnnnnnnnnnnnnnnnnnnnnnnnnnnnnnnnnnnnnnnnnnnnnnnnnnnnnnnnnnnnnnnnnnnnnnnnnnnnnnnnnnnnnnnnnnnnnnnnnnnnnnnnnnnnnnnnnnnnnnnnnnnnnnnnnnnnnnnnnnnnnnnnnnnnnnnnnnnnnnnnnnnnnnnnnnnnnnnnnnnnnnnnnnnnnnnnnnnnnnnnnnnnnnnnnnnnnnnnnnnnnnnnnnnnnnnnnnnnnnnnnnnnnnnnnnnnnnnnnnnnnnnnnnnnnnnnnnnnnnnnnnnnnnnnnnnnnnnnnnnnnnnnnnnnnnnnnnnnnnnnnnnnnnnnnnnnnnnnnnnnnnnnnnnnnnnnnnnnnnnnnnnnnnnnnnnnnnnnnnnnnnnnnnnnnnnnnnnnnnnnnnnnnnnnnnnnnnnnnnnnnnnnnnnnnnnnnnnnnnnnnnnnnnnnnnnnnnnnnnnnnnnnnnnnnnnnnnnnnnnnnnnnnnnnnnnnnnnnnnnnnnnnnnnnnnnnnnnnnnnnnnnnnnnnnnnnnnnnnnnnnnnnnnnnnnnnnnnnnnnnnnnnnnnnnnnnnnnnnnnnnnnnnnnnnnnnnnnnnnnnnnnnnnnnnnnnnnnnnnnnnnnnnnnnnnnnnnnnnnnnnnnnnnnnnnnnnnnnnnnnnnnnnnnnnnnnnnnnnnnnnnnnnnnnnnnnnnnnnnnnnnnnnnnnnnnnnnnnnnnnnnnnnnnnnnnnnnnnnnnnnnnnnnnnnnnnnnnnnnnnnnnnnnnnnnnnnnnnnnnnnnnnnnnnnnnnnnnnnnnnnnnnnnnnnnnnnnnnnnnnnnnnnnnnnnnnnnnnnnnnnnnnnnnnnnnnnnnnnnnnnnnnnnnnnnnnnnnnnnnnnnnnnnnnnnnnnnnnnnnnnnnnnnnnnnnnnnnnnnnnnnnnnnnnnnnnnnnnnnnnnnnnnnnnnnnnnnnnnnnnnnnnnnnnnnnnnnnnnnnnnnnnnnnnnnnnnnnnnnnnnnnnnnnnnnnnnnnnnnnnnnnnnnnnnnnnnnnnnnnnnnnnnnnnnnnnnnnnnnnnnnnnnnnnnnnnnnnnnnnnnnnnnnnnnnnnnnnnnnnnnnnnnnnnnnnnnnnnnnnnnnnnnnnnnnnnnnnnnnnnnnnnnnnnnnnnnnnnnnnnnnnnnnnnnnnnnnnnnnnnnnnnnnnnnnnnnnnnnnnnnnnnnnnnnnnnnnnnnnnnnnnnnnnnnnnnnnnnnnnnnnnnnnnnnnnnnnnnnnnnnnnnnnnnnnnnnnnnnnnnnnnnnnnnnnnnnnnnnnnnnnnnnnnnnnnnnnnnnnnnnnnnnnnnnnnnnnnnnnnnnnnnnnnnnnnnnnnnnnnnnnnnnnnnnnnnnnnnnnnnnnnnnnnnnnnnnnnnnnnnnnnnnnnnnnnnnnnnnnnnnnnnnnnnnnnnnnnnnnnnnnnnnnnnnnnnnnnnnnnnnnnnnnnnnnnnnnnnnnnnnnnnnnnnnnnnnnnnnnnnnnnnnnnnnnnnnnnnnnnnnnnnnnnnnnnnnnnnnnnnnnnnnnnnnnnnnnnnnnnnnnnnnnnnnnnnnnnnnnnnnnnnnnnnnnnnnnnnnnnnnnnnnnnnnnnnnnnnnnnnnnnnnnnnnnnnnnnnnnnnnnnnnnnnnnnnnnnnnnnnnnnnnnnnnnnnnnnnnnnnnnnnnnnnnnnnnnnnnnnnnnnnnnnnnnnnnnnnnnnnnnnnnnnnnnnnnnnnnnnnnnnnnnnnnnnnnnnnnnnnnnnnnnnnnnnnnnnnnnnnnnnnnnnnnnnnnnnnnnnnnnnnnnnnnnnnnnnnnnnnnnnnnnnnnnnnnnnnnnnnnnnnnnnnnnnnnnnnnnnnnnnnnnnnnnnnnnnnnnnnnnnnnnnnnnnnnnnnnnnnnnnnnnnnnnnnnnnnnnnnnnnnnnnnnnnnnnnnnnnnnnnnnnnnnnnnnnnnnnnnnnnnnnnnnnnnnnnnnnnnnnnnnnnnnnnnnnnnnnnnnnnnnnnnnnnnnnnnnnnnnnnnnnnnnnnnnnnnnnnnnnnnnnnnnnnnnnnnnnnnnnnnnnnnnnnnnnnnnnnnnnnnnnnnnnnnnnnnnnnnnnnnnnnnnnnnnnnnnnnnnnnnnnnnnnnnnnnnnnnnnnnnnnnnnnnnnnnnnnnnnnnnnnnnnnnnnnnnnnnnnnnnnnnnnnnnnnnnnnnnnnnnnnnnnnnnnnnnnnnnnnnnnnnnnnnnnnnnnnnnnnnnnnnnnnnnnnnnnnnnnnnnnnnnnnnnnnnnnnnnnnnnnnnnnnnnnnnnnnnnnnnnnnnnnnnnnnnnnnnnnnnnnnnnnnnnnnnnnnnnnnnnnnnnnnnnnnnnnnnnnnnnnnnnnnnnnnnnnnnnnnnnnnnnnnnnnnnnnnnnnnnnnnnnnnnnnnnnnnnnnnnnnnnnnnnnnnnnnnnnnnnnnnnnnnnnnnnnnnnnnnnnnnnnnnnnnnnnnnnnnnnnnnnnnnnnnnnnnnnnnnnnnnnnnnnnnnnnnnnnnnnnnnnnnnnnnnnnnnnnnnnnnnnnnnnnnnnnnnnnnnnnnnnnnnnnnnnnnnnnnnnnnnnnnnnnnnnnnnnnnnnnnnnnnnnnnnnnnnnnnnnnnnnnnnnnnnnnnnnnnnnnnnnnnnnnnnnnnnnnnnnnnnnnnnnnnnnnnnnnnnnnnnnnnnnnnnnnnnnnnnnnnnnnnnnnnnnnnnnnnnnnnnnnnnnnnnnnnnnnnnnnnnnnnnnnnnnnnnnnnnnnnnnnnnnnnnnnnnnnnnnnnnnnnnnnnnnnnnnnnnnnnnnnnnnnnnnnnnnnnnnnnnnnnnnnnnnnnnnnnnnnnnnnnnnnnnnnnnnnnnnnnnnnnnnnnnnnnnnnnnnnnnnnnnnnnnnnnnnnnnnnnnnnnnnnnnnnnnnnnnnnnnnnnnnnnnnnnnnnnnnnnnnnnnnnnnnnnnnnnnnnnnnnnnnnnnnnnnnnnnnnnnnnnnnnnnnnnnnnnnnnnnnnnnnnnnnnnnnnnnnnnnnnnnnnnnnnnnnnnnnnnnnnnnnnnnnnnnnnnnnnnnnnnnnnnnnnnnnnnnnnnnnnnnnnnnnnnnnnnnnnnnnnnnnnnnnnnnnnnnnnnnnnnnnnnnnnnnnnnnnnnnnnnnnnnnnnnnnnnnnnnnnnnnnnnnnnnnnnnnnnnnnnnnnnnnnnnnnnnnnnnnnnnnnnnnnnnnnnnnnnnnnnnnnnnnnnnnnnnnnnnnnnnnnnnnnnnnnnnnnnnnnnnnnnnnnnnnnnnnnnnnnnnnnnnnnnnnnnnnnnnnnnnnnnnnnnnnnnnnnnnnnnnnnnnnnnnnnnnnnnnnnnnnnnnnnnnnnnnnnnnnnnnnnnnnnnnnnnnnnnnnnnnnnnnnnnnnnnnnnnnnnnnnnnnnnnnnnnnnnnnnnnnnnnnnnnnnnnnnnnnnnnnnnnnnnnnnnnnnnnnnnnnnnnnnnnnnnnnnnnnnnnnnnnnnnnnnnnnnnnnnnnnnnnnnnnnnnnnnnnnnnnnnnnnnnnnnnnnnnnnnnnnnnnnnnnnnnnnnnnnnnnnnnnnnnnnnnnnnnnnnnnnnnnnnnnnnnnnnnnnnnnnnnnnnnnnnnnnnnnnnnnnnnnnnnnnnnnnnnnnnnnnnnnnnnnnnnnnnnnnnnnnnnnnnnnnnnnnnnnnnnnnnnnnnnnnnnnnnnnnnnnnnnnnnnnnnnnnnnnnnnnnnnnnnnnnnnnnnnnnnnnnnnnnnnnnnnnnnnnnnnnnnnnnnnnnnnnnnnnnnnnnnnnnnnnnnnnnnnnnnnnnnnnnnnnnnnnnnnnnnnnnnnnnnnnnnnnnnnnnnnnnnnnnnnnnnnnnnnnnnnnnnnnnnnnnnnnnnnnnnnnnnnnnnnnnnnnnnnnnnnnnnnnnnnnnnnnnnnnnnnnnnnnnnnnnnnnnnnnnnnnnnnnnnnnnnnnnnnnnnnnnnnnnnnnnnnnnnnnnnnnnnnnnnnnnnnnnnnnnnnnnnnnnnnnnnnnnnnnnnnnnnnnnnnnnnnnnnnnnnnnnnnnnnnnnnnnnnnnnnnnnnnnnnnnnnnnnnnnnnnnnnnnnnnnnnnnnnnnnnnnnnnnnnnnnnnnnnnnnnnnnnnnnnnnnnnnnnnnnnnnnnnnnnnnnnnnnnnnnnnnnnnnnnnnnnnnnnnnnnnnnnnnnnnnnnnnnnnnnnnnnnnnnnnnnnnnnnnnnnnnnnnnnnnnnnnnnnnnnnnnnnnnnnnnnnnnnnnnnnnnnnnnnnnnnnnnnnnnnnnnnnnnnnnnnnnnnnnnnnnnnnnnnnnnnnnnnnnnnnnnnnnnnnnnnnnnnnnnnnnnnnnnnnnnnnnnnnnnnnnnnnnnnnnnnnnnnnnnnnnnnnnnnnnnnnnnnnnnnnnnnnnnnnnnnnnnnnnnnnnnnnnnnnnnnnnnnnnnnnnnnnnnnnnnnnnnnnnnnnnnnnnnnnnnnnnnnnnnnnnnnnnnnnnnnnnnnnnnnnnnnnnnnnnnnnnnnnnnnnnnnnnnnnnnnnnnnnnnnnnnnnnnnnnnnnnnnnnnnnnnnnnnnnnnnnnnnnnnnnnnnnnnnnnnnnnnnnnnnnnnnnnnnnnnnnnnnnnnnnnnnnnnnnnnnnnnnnnnnnnnnnnnnnnnnnnnnnnnnnnnnnnnnnnnnnnnnnnnnnnnnnnnnnnnnnnnnnnnnnnnnnnnnnnnnnnnnnnnnnnnnnnnnnnnnnnnnnnnnnnnnnnnnnnnnnnnnnnnnnnnnnnnnnnnnnnnnnnnnnnnnnnnnnnnnnnnnnnnnnnnnnnnnnnnnnnnnnnnnnnnnnnnnnnnnnnnnnnnnnnnnnnnnnnnnnnnnnnnnnnnnnnnnnnnnnnnnnnnnnnnnnnnnnnnnnnnnnnnnnnnnnnnnnnnnnnnnnnnnnnnnnnnnnnnnnnnnnnnnnnnnnnnnnnnnnnnnnnnnnnnnnnnnnnnnnnnnnnnnnnnnnnnnnnnnnnnnnnnnnnnnnnnnnnnnnnnnnnnnnnnnnnnnnnnnnnnnnnnnnnnnnnnnnnnnnnnnnnnnnnnnnnnnnnnnnnnnnnnnnnnnnnnnnnnnnnnnnnnnnnnnnnnnnnnnnnnnnnnnnnnnnnnnnnnnnnnnnnnnnnnnnnnnnnnnnnnnnnnnnnnnnnnnnnnnnnnnnnnnnnnnnnnnnnnnnnnnnnnnnnnnnnnnnnnnnnnnnnnnnnnnnnnnnnnnnnnnnnnnnnnnnnnnnnnnnnnnnnnnnnnnnnnnnnnnnnnnnnnnnnnnnnnnnnnnnnnnnnnnnnnnnnnnnnnnnnnnnnnnnnnnnnnnnnnnnnnnnnnnnnnnnnnnnnnnnnnnnnnnnnnnnnnnnnnnnnnnnnnnnnnnnnnnnnnnnnnnnnnnnnnnnnnnnnnnnnnnnnnnnnnnnnnnnnnnnnnnnnnnnnnnnnnnnnnnnnnnnnnnnnnnnnnnnnnnnnnnnnnnnnnnnnnnnnnnnnnnnnnnnnnnnnnnnnnnnnnnnnnnnnnnnnnnnnnnnnnnnnnnnnnnnnnnnnnnnnnnnnnnnnnnnnnnnnnnnnnnnnnnnnnnnnnnnnnnnnnnnnnnnnnnnnnnnnnnnnnnnnnnnnnnnnnnnnnnnnnnnnnnnnnnnnnnnnnnnnnnnnnnnnnnnnnnnnnnnnnnnnnnnnnnnnnnnnnnnnnnnnnnnnnnnnnnnnnnnnnnnnnnnnnnnnnnnnnnnnnnnnnnnnnnnnnnnnnnnnnnnnnnnnnnnnnnnnnnnnnnnnnnnnnnnnnnnnnnnnnnnnnnnnnnnnnnnnnnnnnnnnnnnnnnnnnnnnnnnnnnnnnnnnnnnnnnnnnnnnnnnnnnnnnnnnnnnnnnnnnnnnnnnnnnnnnnnnnnnnnnnnnnnnnnnnnnnnnnnnnnnnnnnnnnnnnnnnnnnnnnnnnnnnnnnnnnnnnnnnnnnnnnnnnnnnnnnnnnnnnnnnnnnnnnnnnnnnnnnnnnnnnnnnnnnnnnnnnnnnnnnnnnnnnnnnnnnnnnnnnnnnnnnnnnnnnnnnnnnnnnnnnnnnnnnnnnnnnnnnnnnnnnnnnnnnnnnnnnnnnnnnnnnnnnnnnnnnnnnnnnnnnnnnnnnnnnnnnnnnnnnnnnnnnnnnnnnnnnnnnnnnnnnnnnnnnnnnnnnnnnnnnnnnnnnnnnnnnnnnnnnnnnnnnnnnnnnnnnnnnnnnnnnnnnnnnnnnnnnnnnnnnnnnnnnnnnnnnnnnnnnnnnnnnnnnnnnnnnnnnnnnnnnnnnnnnnnnnnnnnnnnnnnnnnnnnnnnnnnnnnnnnnnnnnnnnnnnnnnnnnnnnnnnnnnnnnnnnnnnnnnnnnnnnnnnnnnnnnnnnnnnnnnnnnnnnnnnnnnnnnnnnnnnnnnnnnnnnnnnnnnnnnnnnnnnnnnnnnnnnnnnnnnnnnnnnnnnnnnnnnnnnnnnnnnnnnnnnnnnnnnnnnnnnnnnnnnnnnnnnnnnnnnnnnnnnnnnnnnnnnnnnnnnnnnnnnnnnnnnnnnnnnnnnnnnnnnnnnnnnnnnnnnnnnnnnnnnnnnnnnnnnnnnnnnnnnnnnnnnnnnnnnnnnnnnnnnnnnnnnnnnnnnnnnnnnnnnnnnnnnnnnnnnnnnnnnnnnnnnnnnnnnnnnnnnnnnnnnnnnnnnnnnnnnnnnnnnnnnnnnnnnnnnnnnnnnnnnnnnnnnnnnnnnnnnnnnnnnnnnnnnnnnnnnnnnnnnnnnnnnnnnnnnnnnnnnnnnnnnnnnnnnnnnnnnnnnnnnnnnnnnnnnnnnnnnnnnnnnnnnnnnnnnnnnnnnnnnnnnnnnnnnnnnnnnnnnnnnnnnnnnnnnnnnnnnnnnnnnnnnnnnnnnnnnnnnnnnnnnnnnnnnnnnnnnnnnnnnnnnnnnnnnnnnnnnnnnnnnnnnnnnnnnnnnnnnnnnnnnnnnnnnnnnnnnnnnnnnnnnnnnnnnnnnnnnnnnnnnnnnnnnnnnnnnnnnnnnnnnnnnnnnnnnnnnnnnnnnnnnnnnnnnnnnnnnnnnnnnnnnnnnnnnnnnnnnnnnnnnnnnnnnnnnnnnnnnnnnnnnnnnnnnnnnnnnnnnnnnnnnnnnnnnnnnnnnnnnnnnnnnnnnnnnnnnnnnnnnnnnnnnnnnnnnnnnnnnnnnnnnnnnnnnnnnnnnnnnnnnnnnnnnnnnnnnnnnnnnnnnnnnnnnnnnnnnnnnnnnnnnnnnnnnnnnnnnnnnnnnnnnnnnnnnnnnnnnnnnnnnnnnnnnnnnnnnnnnnnnnnnnnnnnnnnnnnnnnnnnnnnnnnnnnnnnnnnnnnnnnnnnnnnnnnnnnnnnnnnnnnnnnnnnnnnnnnnnnnnnnnnnnnnnnnnnnnnnnnnnnnnnnnnnnnnnnnnnnnnnnnnnnnnnnnnnnnnnnnnnnnnnnnnnnnnnnnnnnnnnnnnnnnnnnnnnnnnnnnnnnnnnnnnnnnnnnnnnnnnnnnnnnnnnnnnnnnnnnnnnnnnnnnnnnnnnnnnnnnnnnnnnnnnnnnnnnnnnnnnnnnnnnnnnnnnnnnnnnnnnnnnnnnnnnnnnnnnnnnnnnnnnnnnnnnnnnnnnnnnnnnnnnnnnnnnnnnnnnnnnnnnnnnnnnnnnnnnnnnnnnnnnnnnnnnnnnnnnnnnnnnnnnnnnnnnnnnnnnnnnnnnnnnnnnnnnnnnnnnnnnnnnnnnnnnnnnnnnnnnnnnnnnnnnnnnnnnnnnnnnnnnnnnnnnnnnnnnnnnnnnnnnnnnnnnnnnnnnnnnnnnnnnnnnnnnnnnnnnnnnnnnnnnnnnnnnnnnnnnnnnnnnnnnnnnnnnnnnnnnnnnnnnnnnnnnnnnnnnnnnnnnnnnnnnnnnnnnnnnnnnnnnnnnnnnnnnnnnnnnnnnnnnnnnnnnnnnnnnnnnnnnnnnnnnnnnnnnnnnnnnnnnnnnnnnnnnnnnnnnnnnnnnnnnnnnnnnnnnnnnnnnnnnnnnnnnnnnnnnnnnnnnnnnnnnnnnnnnnnnnnnnnnnnnnnnnnnnnnnnnnnnnnnnnnnnnnnnnnnnnnnnnnnnnnnnnnnnnnnnnnnnnnnnnnnnnnnnnnnnnnnnnnnnnnnnnnnnnnnnnnnnnnnnnnnnnnnnnnnnnnnnnnnnnnnnnnnnnnnnnnnnnnnnnnnnnnnnnnnnnnnnnnnnnnnnnnnnnnnnnnnnnnnnnnnnnnnnnnnnnnnnnnnnnnnnnnnnnnnnnnnnnnnnnnnnnnnnnnnnnnnnnnnnnnnnnnnnnnnnnnnnnnnnnnnnnnnnnnnnnnnnnnnnnnnnnnnnnnnnnnnnnnnnnnnnnnnnnnnnnnnnnnnnnnnnnnnnnnnnnnnnnnnnnnnnnnnnnnnnnnnnnnnnnnnnnnnnnnnnnnnnnnnnnnnnnnnnnnnnnnnnnnnnnnnnnnnnnnnnnnnnnnnnnnnnnnnnnnnnnnnnnnnnnnnnnnnnnnnnnnnnnnnnnnnnnnnnnnnnnnnnnnnnnnnnnnnnnnnnnnnnnnnnnnnnnnnnnnnnnnnnnnnnnnnnnnnnnnnnnnnnnnnnnnnnnnnnnnnnnnnnnnnnnnnnnnnnnnnnnnnnnnnnnnnnnnnnnnnnnnnnnnnnnnnnnnnnnnnnnnnnnnnnnnnnnnnnnnnnnnnnnnnnnnnnnnnnnnnnnnnnnnnnnnnnnnnnnnnnnnnnnnnnnnnnnnnnnnnnnnnnnnnnnnnnnnnnnnnnnnnnnnnnnnnnnnnnnnnnnnnnnnnnnnnnnnnnnnnnnnnnnnnnnnnnnnnnnnnnnnnnnnnnnnnnnnnnnnnnnnnnnnnnnnnnnnnnnnnnnnnnnnnnnnnnnnnnnnnnnnnnnnnnnnnnnnnnnnnnnnnnnnnnnnnnnnnnnnnnnnnnnnnnnnnnnnnnnnnnnnnnnnnnnnnnnnnnnnnnnnnnnnnnnnnnnnnnnnnnnnnnnnnnnnnnnnnnnnnnnnnnnnnnnnnnnnnnnnnnnnnnnnnnnnnnnnnnnnnnnnnnnnnnnnnnnnnnnnnnnnnnnnnnnnnnnnnnnnnnnnnnnnnnnnnnnnnnnnnnnnnnnnnnnnnnnnnnnnnnnnnnnnnnnnnnnnnnnnnnnnnnnnnnnnnnnnnnnnnnnnnnnnnnnnnnnnnnnnnnnnnnnnnnnnnnnnnnnnnnnnnnnnnnnnnnnnnnnnnnnnnnnnnnnnnnnnnnnnnnnnnnnnnnnnnnnnnnnnnnnnnnnnnnnnnnnnnnnnnnnnnnnnnnnnnnnnnnnnnnnnnnnnnnnnnnnnnnnnnnnnnnnnnnnnnnnnnnnnnnnnnnnnnnnnnnnnnnnnnnnnnnnnnnnnnnnnnnnnnnnnnnnnnnnnnnnnnnnnnnnnnnnnnnnnnnnnnnnnnnnnnnnnnnnnnnnnnnnnnnnnnnnnnnnnnnnnnnnnnnnnnnnnnnnnnnnnnnnnnnnnnnnnnnnnnnnnnnnnnnnnnnnnnnnnnnnnnnnnnnnnnnnnnnnnnnnnnnnnnnnnnnnnnnnnnnnnnnnnnnnnnnnnnnnnnnnnnnnnnnnnnnnnnnnnnnnnnnnnnnnnnnnnnnnnnnnnnnnnnnnnnnnnnnnnnnnnnnnnnnnnnnnnnnnnnnnnnnnnnnnnnnnnnnnnnnnnnnnnnnnnnnnnnnnnnnnnnnnnnnnnnnnnnnnnnnnnnnnnnnnnnnnnnnnnnnnnnnnnnnnnnnnnnnnnnnnnnnnnnnnnnnnnnnnnnnnnnnnnnnnnnnnnnnnnnnnnnnnnnnnnnnnnnnnnnnnnnnnnnnnnnnnnnnnnnnnnnnnnnnnnnnnnnnnnnnnnnnnnnnnnnnnnnnnnnnnnnnnnnnnnnnnnnnnnnnnnnnnnnnnnnnnnnnnnnnnnnnnnnnnnnnnnnnnnnnnnnnnnnnnnnnnnnnnnnnnnnnnnnnnnnnnnnnnnnnnnnnnnnnnnnnnnnnnnnnnnnnnnnnnnnnnnnnnnnnnnnnnnnnnnnnnnnnnnnnnnnnnnnnnnnnnnnnnnnnnnnnnnnnnnnnnnnnnnnnnnnnnnnnnnnnnnnnnnnnnnnnnnnnnnnnnnnnnnnnnnnnnnnnnnnnnnnnnnnnnnnnnnnnnnnnnnnnnnnnnnnnnnnnnnnnnnnnnnnnnnnnnnnnnnnnnnnnnnnnnnnnnnnnnnnnnnnnnnnnnnnnnnnnnnnnnnnnnnnnnnnnnnnnnnnnnnnnnnnnnnnnnnnnnnnnnnnnnnnnnnnnnnnnnnnnnnnnnnnnnnnnnnnnnnnnnnnnnnnnnnnnnnnnnnnnnnnnnnnnnnnnnnnnnnnnnnnnnnnnnnnnnnnnnnnnnnnnnnnnnnnnnnnnnnnnnnnnnnnnnnnnnnnnnnnnnnnnnnnnnnnnnnnnnnnnnnnnnnnnnnnnnnnnnnnnnnnnnnnnnnnnnnnnnnnnnnnnnnnnnnnnnnnnnnnnnnnnnnnnnnnnnnnnnnnnnnnnnnnnnnnnnnnnnnnnnnnnnnnnnnnnnnnnnnnnnnnnnnnnnnnnnnnnnnnnnnnnnnnnnnnnnnnnnnnnnnnnnnnnnnnnnnnnnnnnnnnnnnnnnnnnnnnnnnnnnnnnnnnnnnnnnnnnnnnnnnnnnnnnnnnnnnnnnnnnnnnnnnnnnnnnnnnnnnnnnnnnnnnnnnnnnnnnnnnnnnnnnnnnnnnnnnnnnnnnnnnnnnnnnnnnnnnnnnnnnnnnnnnnnnnnnnnnnnnnnnnnnnnnnnnnnnnnnnnnnnnnnnnnnnnnnnnnnnnnnnnnnnnnnnnnnnnnnnnnnnnnnnnnnnnnnnnnnnnnnnnnnnnnnnnnnnnnnnnnnnnnnnnnnnnnnnnnnnnnnnnnnnnnnnnnnnnnnnnnnnnnnnnnnnnnnnnnnnnnnnnnnnnnnnnnnnnnnnnnnnnnnnnnnnnnnnnnnnnnnnnnnnnnnnnnnnnnnnnnnnnnnnnnnnnnnnnnnnnnnnnnnnnnnnnnnnnnnnnnnnnnnnnnnnnnnnnnnnnnnnnnnnnnnnnnnnnnnnnnnnnnnnnnnnnnnnnnnnnnnnnnnnnnnnnnnnnnnnnnnnnnnnnnnnnnnnnnnnnnnnnnnnnnnnnnnnnnnnnnnnnnnnnnnnnnnnnnnnnnnnnnnnnnnnnnnnnnnnnnnnnnnnnnnnnnnnnnnnnnnnnnnnnnnnnnnnnnnnnnnnnnnnnnnnnnnnnnnnnnnnnnnnnnnnnnnnnnnnnnnnnnnnnnnnnnnnnnnnnnnnnnnnnnnnnnnnnnnnnnnnnnnnnnnnnnnnnnnnnnnnnnnnnnnnnnnnnnnnnnnnnnnnnnnnnnnnnnnnnnnnnnnnnnnnnnnnnnnnnnnnnnnnnnnnnnnnnnnnnnnnnnnnnnnnnnnnnnnnnnnnnnnnnnnnnnnnnnnnnnnnnnnnnnnnnnnnnnnnnnnnnnnnnnnnnnnnnnnnnnnnnnnnnnnnnnnnnnnnnnnnnnnnnnnnnnnnnnnnnnnnnnnnnnnnnnnnnnnnnnnnnnnnnnnnnnnnnnnnnnnnnnnnnnnnnnnnnnnnnnnnnnnnnnnnnnnnnnnnnnnnnnnnnnnnnnnnnnnnnnnnnnnnnnnnnnnnnnnnnnnnnnnnnnnnnnnnnnnnnnnnnnnnnnnnnnnnnnnnnnnnnnnnnnnnnnnnnnnnnnnnnnnnnnnnnnnnnnnnnnnnnnnnnnnnnnnnnnnnnnnnnnnnnnnnnnnnnnnnnnnnnnnnnnnnnnnnnnnnnnnnnnnnnnnnnnnnnnnnnnnnnnnnnnnnnnnnnnnnnnnnnnnnnnnnnnnnnnnnnnnnnnnnnnnnnnnnnnnnnnnnnnnnnnnnnnnnnnnnnnnnnnnnnnnnnnnnnnnnnnnnnnnnnnnnnnnnnnnnnnnnnnnnnnnnnnnnnnnnnnnnnnnnnnnnnnnnnnnnnnnnnnnnnnnnnnnnnnnnnnnnnnnnnnnnnnnnnnnnnnnnnnnnnnnnnnnnnnnnnnnnnnnnnnnnnnnnnnnnnnnnnnnnnnnnnnnnnnnnnnnnnnnnnnnnnnnnnnnnnnnnnnnnnnnnnnnnnnnnnnnnnnnnnnnnnnnnnnnnnnnnnnnnnnnnnnnnnnnnnnnnnnnnnnnnnnnnnnnnnnnnnnnnnnnnnnnnnnnnnnnnnnnnnnnnnnnnnnnnnnnnnnnnnnnnnnnnnnnnnnnnnnnnnnnnnnnnnnnnnnnnnnnnnnnnnnnnnnnnnnnnnnnnnnnnnnnnnnnnnnnnnnnnnnnnnnnnnnnnnnnnnnnnnnnnnnnnnnnnnnnnnnnnnnnnnnnnnnnnnnnnnnnnnnnnnnnnnnnnnnnnnnnnnnnnnnnnnnnnnnnnnnnnnnnnnnnnnnnnnnnnnnnnnnnnnnnnnnnnnnnnnnnnnnnnnnnnnnnnnnnnnnnnnnnnnnnnnnnnnnnnnnnnnnnnnnnnnnnnnnnnnnnnnnnnnnnnnnnnnnnnnnnnnnnnnnnnnnnnnnnnnnnnnnnnnnnnnnnnnnnnnnnnnnnnnnnnnnnnnnnnnnnnnnnnnnnnnnnnnnnnnnnnnnnnnnnnnnnnnnnnnnnnnnnnnnnnnnnnnnnnnnnnnnnnnnnnnnnnnnnnnnnnnnnnnnnnnnnnnnnnnnnnnnnnnnnnnnnnnnnnnnnnnnnnnnnnnnnnnnnnnnnnnnnnnnnnnnnnnnnnnnnnnnnnnnnnnnnnnnnnnnnnnnnnnnnnnnnnnnnnnnnnnnnnnnnnnnnnnnnnnnnnnnnnnnnnnnnnnnnnnnnnnnnnnnnnnnnnnnnnnnnnnnnnnnnnnnnnnnnnnnnnnnnnnnnnnnnnnnnnnnnnnnnnnnnnnnnnnnnnnnnnnnnnnnnnnnnnnnnnnnnnnnnnnnnnnnnnnnnnnnnnnnnnnnnnnnnnnnnnnnnnnnnnnnnnnnnnnnnnnnnnnnnnnnnnnnnnnnnnnnnnnnnnnnnnnnnnnnnnnnnnnnnnnnnnnnnnnnnnnnnnnnnnnnnnnnnnnnnnnnnnnnnnnnnnnnnnnnnnnnnnnnnnnnnnnnnnnnnnnnnnnnnnnnnnnnnnnnnnnnnnnnnnnnnnnnnnnnnnnnnnnnnnnnnnnnnnnnnnnnnnnnnnnnnnnnnnnnnnnnnnnnnnnnnnnnnnnnnnnnnnnnnnnnnnnnnnnnnnnnnnnnnnnnnnnnnnnnnnnnnnnnnnnnnnnnnnnnnnnnnnnnnnnnnnnnnnnnnnnnnnnnnnnnnnnnnnnnnnnnnnnnnnnnnnnnnnnnnnnnnnnnnnnnnnnnnnnnnnnnnnnnnnnnnnnnnnnnnnnnnnnnnnnnnnnnnnnnnnnnnnnnnnnnnnnnnnnnnnnnnnnnnnnnnnnnnnnnnnnnnnnnnnnnnnnnnnnnnnnnnnnnnnnnnnnnnnnnnnnnnnnnnnnnnnnnnnnnnnnnnnnnnnnnnnnnnnnnnnnnnnnnnnnnnnnnnnnnnnnnnnnnnnnnnnnnnnnnnnnnnnnnnnnnnnnnnnnnnnnnnnnnnnnnnnnnnnnnnnnnnnnnnnnnnnnnnnnnnnnnnnnnnnnnnnnnnnnnnnnnnnnnnnnnnnnnnnnnnnnnnnnnnnnnnnnnnnnnnnnnnnnnnnnnnnnnnnnnnnnnnnnnnnnnnnnnnnnnnnnnnnnnnnnnnnnnnnnnnnnnnnnnnnnnnnnnnnnnnnnnnnnnnnnnnnnnnnnnnnnnnnnnnnnnnnnnnnnnnnnnnnnnnnnnnnnnnnnnnnnnnnnnnnnnnnnnnnnnnnnnnnnnnnnnnnnnnnnnnnnnnnnnnnnnnnnnnnnnnnnnnnnnnnnnnnnnnnnnnnnnnnnnnnnnnnnnnnnnnnnnnnnnnnnnnnnnnnnnnnnnnnnnnnnnnnnnnnnnnnnnnnnnnnnnnnnnnnnnnnnnnnnnnnnnnnnnnnnnnnnnnnnnnnnnnnnnnnnnnnnnnnnnnnnnnnnnnnnnnnnnnnnnnnnnnnnnnnnnnnnnnnnnnnnnnnnnnnnnnnnnnnnnnnnnnnnnnnnnnnnnnnnnnnnnnnnnnnnnnnnnnnnnnnnnnnnnnnnnnnnnnnnnnnnnnnnnnnnnnnnnnnnnnnnnnnnnnnnnnnnnnnnnnnnnnnnnnnnnnnnnnnnnnnnnnnnnnnnnnnnnnnnnnnnnnnnnnnnnnnnnnnnnnnnnnnnnnnnnnnnnnnnnnnnnnnnnnnnnnnnnnnnnnnnnnnnnnnnnnnnnnnnnnnnnnnnnnnnnnnnnnnnnnnnnnnnnnnnnnnnnnnnnnnnnnnnnnnnnnnnnnnnnnnnnnnnnnnnnnnnnnnnnnnnnnnnnnnnnnnnnnnnnnnnnnnnnnnnnnnnnnnnnnnnnnnnnnnnnnnnnnnnnnnnnnnnnnnnnnnnnnnnnnnnnnnnnnnnnnnnnnnnnnnnnnnnnnnnnnnnnnnnnnnnnnnnnnnnnnnnnnnnnnnnnnnnnnnnnnnnnnnnnnnnnnnnnnnnnnnnnnnnnnnnnnnnnnnnnnnnnnnnnnnnnnnnnnnnnnnnnnnnnnnnnnnnnnnnnnnnnnnnnnnnnnnnnnnnnnnnnnnnnnnnnnnnnnnnnnnnnnnnnnnnnnnnnnnnnnnnnnnnnnnnnnnnnnnnnnnnnnnnnnnnnnnnnnnnnnnnnnnnnnnnnnnnnnnnnnnnnnnnnnnnnnnnnnnnnnnnnnnnnnnnnnnnnnnnnnnnnnnnnnnnnnnnnnnnnnnnnnnnnnnnnnnnnnnnnnnnnnnnnnnnnnnnnnnnnnnnnnnnnnnnnnnnnnnnnnnnnnnnnnnnnnnnnnnnnnnnnnnnnnnnnnnnnnnnnnnnnnnnnnnnnnnnnnnnnnnnnnnnnnnnnnnnnnnnnnnnnnnnnnnnnnnnnnnnnnnnnnnnnnnnnnnnnnnnnnnnnnnnnnnnnnnnnnnnnnnnnnnnnnnnnnnnnnnnnnnnnnnnnnnnnnnnnnnnnnnnnnnnnnnnnnnnnnnnnnnnnnnnnnnnnnnnnnnnnnnnnnnnnnnnnnnnnnnnnnnnnnnnnnnnnnnnnnnnnnnnnnnnnnnnnnnnnnnnnnnnnnnnnnnnnnnnnnnnnnnnnnnnnnnnnnnnnnnnnnnnnnnnnnnnnnnnnnnnnnnnnnnnnnnnnnnnnnnnnnnnnnnnnnnnnnnnnnnnnnnnnnnnnnnnnnnnnnnnnnnnnnnnnnnnnnnnnnnnnnnnnnnnnnnnnnnnnnnnnnnnnnnnnnnnnnnnnnnnnnnnnnnnnnnnnnnnnnnnnnnnnnnnnnnnnnnnnnnnnnnnnnnnnnnnnnnnnnnnnnnnnnnnnnnnnnnnnnnnnnnnnnnnnnnnnnnnnnnnnnnnnnnnnnnnnnnnnnnnnnnnnnnnnnnnnnnnnnnnnnnnnnnnnnnnnnnnnnnnnnnnnnnnnnnnnnnnnnnnnnnnnnnnnnnnnnnnnnnnnnnnnnnnnnnnnnnnnnnnnnnnnnnnnnnnnnnnnnnnnnnnnnnnnnnnnnnnnnnnnnnnnnnnnnnnnnnnnnnnnnnnnnnnnnnnnnnnnnnnnnnnnnnnnnnnnnnnnnnnnnnnnnnnnnnnnnnnnnnnnnnnnnnnnnnnnnnnnnnnnnnnnnnnnnnnnnnnnnnnnnnnnnnnnnnnnnnnnnnnnnnnnnnnnnnnnnnnnnnnnnnnnnnnnnnnnnnnnnnnnnnnnnnnnnnnnnnnnnnnnnnnnnnnnnnnnnnnnnnnnnnnnnnnnnnnnnnnnnnnnnnnnnnnnnnnnnnnnnnnnnnnnnnnnnnnnnnnnnnnnnnnnnnnnnnnnnnnnnnnnnnnnnnnnnnnnnnnnnnnnnnnnnnnnnnnnnnnnnnnnnnnnnnnnnnnnnnnnnnnnnnnnnnnnnnnnnnnnnnnnnnnnnnnnnnnnnnnnnnnnnnnnnnnnnnnnnnnnnnnnnnnnnnnnnnnnnnnnnnnnnnnnnnnnnnnnnnnnnnnnnnnnnnnnnnnnnnnnnnnnnnnnnnnnnnnnnnnnnnnnnnnnnnnnnnnnnnnnnnnnnnnnnnnnnnnnnnnnnnnnnnnnnnnnnnnnnnnnnnnnnnnnnnnnnnnnnnnnnnnnnnnnnnnnnnnnnnnnnnnnnnnnnnnnnnnnnnnnnnnnnnnnnnnnnnnnnnnnnnnnnnnnnnnnnnnnnnnnnnnnnnnnnnnnnnnnnnnnnnnnnnnnnnnnnnnnnnnnnnnnnnnnnnnnnnnnnnnnnnnnnnnnnnnnnnnnnnnnnnnnnnnnnnnnnnnnnnnnnnnnnnnnnnnnnnnnnnnnnnnnnnnnnnnnnnnnnnnnnnnnnnnnnnnnnnnnnnnnnnnnnnnnnnnnnnnnnnnnnnnnnnnnnnnnnnnnnnnnnnnnnnnnnnnnnnnnnnnnnnnnnnnnnnnnnnnnnnnnnnnnnnnnnnnnnnnnnnnnnnnnnnnnnnnnnnnnnnnnnnnnnnnnnnnnnnnnnnnnnnnnnnnnnnnnnnnnnnnnnnnnnnnnnnnnnnnnnnnnnnnnnnnnnnnnnnnnnnnnnnnnnnnnnnnnnnnnnnnnnnnnnnnnnnnnnnnnnnnnnnnnnnnnnnnnnnnnnnnnnnnnnnnnnnnnnnnnnnnnnnnnnnnnnnnnnnnnnnnnnnnnnnnnnnnnnnnnnnnnnnnnnnnnnnnnnnnnnnnnnnnnnnnnnnnnnnnnnnnnnnnnnnnnnnnnnnnnnnnnnnnnnnnnnnnnnnnnnnnnnnnnnnnnnnnnnnnnnnnnnnnnnnnnnnnnnnnnnnnnnnnnnnnnnnnnnnnnnnnnnnnnnnnnnnnnnnnnnnnnnnnnnnnnnnnnnnnnnnnnnnnnnnnnnnnnnnnnnnnnnnnnnnnnnnnnnnnnnnnnnnnnnnnnnnnnnnnnnnnnnnnnnnnnnnnnnnnnnnnnnnnnnnnnnnnnnnnnnnnnnnnnnnnnnnnnnnnnnnnnnnnnnnnnnnnnnnnnnnnnnnnnnnnnnnnnnnnnnnnnnnnnnnnnnnnnnnnnnnnnnnnnnnnnnnnnnnnnnnnnnnnnnnnnnnnnnnnnnnnnnnnnnnnnnnnnnnnnnnnnnnnnnnnnnnnnnnnnnnnnnnnnnnnnnnnnnnnnnnnnnnnnnnnnnnnnnnnnnnnnnnnnnnnnnnnnnnnnnnnnnnnnnnnnnnnnnnnnnnnnnnnnnnnnnnnnnnnnnnnnnnnnnnnnnnnnnnnnnnnnnnnnnnnnnnnnnnnnnnnnnnnnnnnnnnnnnnnnnnnnnnnnnnnnnnnnnnnnnnnnnnnnnnnnnnnnnnnnnnnnnnnnnnnnnnnnnnnnnnnnnnnnnnnnnnnnnnnnnnnnnnnnnnnnnnnnnnnnnnnnnnnnnnnnnnnnnnnnnnnnnnnnnnnnnnnnnnnnnnnnnnnnnnnnnnnnnnnnnnnnnnnnnnnnnnnnnnnnnnnnnnnnnnnnnnnnnnnnnnnnnnnnnnnnnnnnnnnnnnnnnnnnnnnnnnnnnnnnnnnnnnnnnnnnnnnnnnnnnnnnnnnnnnnnnnnnnnnnnnnnnnnnnnnnnnnnnnnnnnnnnnnnnnnnnnnnnnnnnnnnnnnnnnnnnnnnnnnnnnnnnnnnnnnnnnnnnnnnnnnnnnnnnnnnnnnnnnnnnnnnnnnnnnnnnnnnnnnnnnnnnnnnnnnnnnnnnnnnnnnnnnnnnnnnnnnnnnnnnnnnnnnnnnnnnnnnnnnnnnnnnnnnnnnnnnnnnnnnnnnnnnnnnnnnnnnnnnnnnnnnnnnnnnnnnnnnnnnnnnnnnnnnnnnnnnnnnnnnnnnnnnnnnnnnnnnnnnnnnnnnnnnnnnnnnnnnnnnnnnnnnnnnnnnnnnnnnnnnnnnnnnnnnnnnnnnnnnnnnnnnnnnnnnnnnnnnnnnnnnnnnnnnnnnnnnnnnnnnnnnnnnnnnnnnnnnnnnnnnnnnnnnnnnnnnnnnnnnnnnnnnnnnnnnnnnnnnnnnnnnnnnnnnnnnnnnnnnnnnnnnnnnnnnnnnnnnnnnnnnnnnnnnnnnnnnnnnnnnnnnnnnnnnnnnnnnnnnnnnnnnnnnnnnnnnnnnnnnnnnnnnnnnnnnnnnnnnnnnnnnnnnnnnnnnnnnnnnnnnnnnnnnnnnnnnnnnnnnnnnnnnnnnnnnnnnnnnnnnnnnnnnnnnnnnnnnnnnnnnnnnnnnnnnnnnnnnnnnnnnnnnnnnnnnnnnnnnnnnnnnnnnnnnnnnnnnnnnnnnnnnnnnnnnnnnnnnnnnnnnnnnnnnnnnnnnnnnnnnnnnnnnnnnnnnnnnnnnnnnnnnnnnnnnnnnnnnnnnnnnnnnnnnnnnnnnnnnnnnnnnnnnnnnnnnnnnnnnnnnnnnnnnnnnnnnnnnnnnnnnnnnnnnnnnnnnnnnnnnnnnnnnnnnnnnnnnnnnnnnnnnnnnnnnnnnnnnnnnnnnnnnnnnnnnnnnnnnnnnnnnnnnnnnnnnnnnnnnnnnnnnnnnnnnnnnnnnnnnnnnnnnnnnnnnnnnnnnnnnnnnnnnnnnnnnnnnnnnnnnnnnnnnnnnnnnnnnnnnnnnnnnnnnnnnnnnnnnnnnnnnnnnnnnnnnnnnnnnnnnnnnnnnnnnnnnnnnnnnnnnnnnnnnnnnnnnnnnnnnnnnnnnnnnnnnnnnnnnnnnnnnnnnnnnnnnnnnnnnnnnnnnnnnnnnnnnnnnnnnnnnnnnnnnnnnnnnnnnnnnnnnnnnnnnnnnnnnnnnnnnnnnnnnnnnnnnnnnnnnnnnnnnnnnnnnnnnnnnnnnnnnnnnnnnnnnnnnnnnnnnnnnnnnnnnnnnnnnnnnnnnnnnnnnnnnnnnnnnnnnnnnnnnnnnnnnnnnnnnnnnnnnnnnnnnnnnnnnnnnnnnnnnnnnnnnnnnnnnnnnnnnnnnnnnnnnnnnnnnnnnnnnnnnnnnnnnnnnnnnnnnnnnnnnnnnnnnnnnnnnnnnnnnnnnnnnnnnnnnnnnnnnnnnnnnnnnnnnnnnnnnnnnnnnnnnnnnnnnnnnnnnnnnnnnnnnnnnnnnnnnnnnnnnnnnnnnnnnnnnnnnnnnnnnnnnnnnnnnnnnnnnnnnnnnnnnnnnnnnnnnnnnnnnnnnnnnnnnnnnnnnnnnnnnnnnnnnnnnnnnnnnnnnnnnnnnnnnnnnnnnnnnnnnnnnnnnnnnnnnnnnnnnnnnnnnnnnnnnnnnnnnnnnnnnnnnnnnnnnnnnnnnnnnnnnnnnnnnnnnnnnnnnnnnnnnnnnnnnnnnnnnnnnnnnnnnnnnnnnnnnnnnnnnnnnnnnnnnnnnnnnnnnnnnnnnnnnnnnnnnnnnnnnnnnnnnnnnnnnnnnnnnnnnnnnnnnnnnnnnnnnnnnnnnnnnnnnnnnnnnnnnnnnnnnnnnnnnnnnnnnnnnnnnnnnnnnnnnnnnnnnnnnnnnnnnnnnnnnnnnnnnnnnnnnnnnnnnnnnnnnnnnnnnnnnnnnnnnnnnnnnnnnnnnnnnnnnnnnnnnnnnnnnnnnnnnnnnnnnnnnnnnnnnnnnnnnnnnnnnnnnnnnnnnnnnnnnnnnnnnnnnnnnnnnnnnnnnnnnnnnnnnnnnnnnnnnnnnnnnnnnnnnnnnnnnnnnnnnnnnnnnnnnnnnnnnnnnnnnnnnnnnnnnnnnnnnnnnnnnnnnnnnnnnnnnnnnnnnnnnnnnnnnnnnnnnnnnnnnnnnnnnnnnnnnnnnnnnnnnnnnnnnnnnnnnnnnnnnnnnnnnnnnnnnnnnnnnnnnnnnnnnnnnnnnnnnnnnnnnnnnnnnnnnnnnnnnnnnnnnnnnnnnnnnnnnnnnnnnnnnnnnnnnnnnnnnnnnnnnnnnnnnnnnnnnnnnnnnnnnnnnnnnnnnnnnnnnnnnnnnnnnnnnnnnnnnnnnnnnnnnnnnnnnnnnnnnnnnnnnnnnnnnnnnnnnnnnnnnnnnnnnnnnnnnnnnnnnnnnnnnnnnnnnnnnnnnnnnnnnnnnnnnnnnnnnnnnnnnnnnnnnnnnnnnnnnnnnnnnnnnnnnnnnnnnnnnnnnnnnnnnnnnnnnnnnnnnnnnnnnnnnnnnnnnnnnnnnnnnnnnnnnnnnnnnnnnnnnnnnnnnnnnnnnnnnnnnnnnnnnnnnnnnnnnnnnnnnnnnnnnnnnnnnnnnnnnnnnnnnnnnnnnnnnnnnnnnnnnnnnnnnnnnnnnnnnnnnnnnnnnnnnnnnnnnnnnnnnnnnnnnnnnnnnnnnnnnnnnnnnnnnnnnnnnnnnnnnnnnnnnnnnnnnnnnnnnnnnnnnnnnnnnnnnnnnnnnnnnnnnnnnnnnnnnnnnnnnnnnnnnnnnnnnnnnnnnnnnnnnnnnnnnnnnnnnnnnnnnnnnnnnnnnnnnnnnnnnnnnnnnnnnnnnnnnnnnnnnnnnnnnnnnnnnnnnnnnnnnnnnnnnnnnnnnnnnnnnnnnnnnnnnnnnnnnnnnnnnnnnnnnnnnnnnnnnnnnnnnnnnnnnnnnnnnnnnnnnnnnnnnnnnnnnnnnnnnnnnnnnnnnnnnnnnnnnnnnnnnnnnnnnnnnnnnnnnnnnnnnnnnnnnnnnnnnnnnnnnnnnnnnnnnnnnnnnnnnnnnnnnnnnnnnnnnnnnnnnnnnnnnnnnnnnnnnnnnnnnnnnnnnnnnnnnnnnnnnnnnnnnnnnnnnnnnnnnnnnnnnnnnnnnnnnnnnnnnnnnnnnnnnnnnnnnnnnnnnnnnnnnnnnnnnnnnnnnnnnnnnnnnnnnnnnnnnnnnnnnnnnnnnnnnnnnnnnnnnnnnnnnnnnnnnnnnnnnnnnnnnnnnnnnnnnnnnnnnnnnnnnnnnnnnnnnnnnnnnnnnnnnnnnnnnnnnnnnnnnnnnnnnnnnnnnnnnnnnnnnnnnnnnnnnnnnnnnnnnnnnnnnnnnnnnnnnnnnnnnnnnnnnnnnnnnnnnnnnnnnnnnnnnnnnnnnnnnnnnnnnnnnnnnnnnnnnnnnnnnnnnnnnnnnnnnnnnnnnnnnnnnnnnnnnnnnnnnnnnnnnnnnnnnnnnnnnnnnnnnnnnnnnnnnnnnnnnnnnnnnnnnnnnnnnnnnnnnnnnnnnnnnnnnnnnnnnnnnnnnnnnnnnnnnnnnnnnnnnnnnnnnnnnnnnnnnnnnnnnnnnnnnnnnnnnnnnnnnnnnnnnnnnnnnnnnnnnnnnnnnnnnnnnnnnnnnnnnnnnnnnnnnnnnnnnnnnnnnnnnnnnnnnnnnnnnnnnnnnnnnnnnnnnnnnnnnnnnnnnnnnnnnnnnnnnnnnnnnnnnnnnnnnnnnnnnnnnnnnnnnnnnnnnnnnnnnnnnnnnnnnnnnnnnnnnnnnnnnnnnnnnnnnnnnnnnnnnnnnnnnnnnnnnnnnnnnnnnnnnnnnnnnnnnnnnnnnnnnnnnnnnnnnnnnnnnnnnnnnnnnnnnnnnnnnnnnnnnnnnnnnnnnnnnnnnnnnnnnnnnnnnnnnnnnnnnnnnnnnnnnnnnnnnnnnnnnnnnnnnnnnnnnnnnnnnnnnnnnnnnnnnnnnnnnnnnnnnnnnnnnnnnnnnnnnnnnnnnnnnnnnnnnnnnnnnnnnnnnnnnnnnnnnnnnnnnnnnnnnnnnnnnnnnnnnnnnnnnnnnnnnnnnnnnnnnnnnnnnnnnnnnnnnnnnnnnnnnnnnnnnnnnnnnnnnnnnnnnnnnnnnnnnnnnnnnnnnnnnnnnnnnnnnnnnnnnnnnnnnnnnnnnnnnnnnnnnnnnnnnnnnnnnnnnnnnnnnnnnnnnnnnnnnnnnnnnnnnnnnnnnnnnnnnnnnnnnnnnnnnnnnnnnnnnnnnnnnnnnnnnnnnnnnnnnnnnnnnnnnnnnnnnnnnnnnnnnnnnnnnnnnnnnnnnnnnnnnnnnnnnnnnnnnnnnnnnnnnnnnnnnnnnnnnnnnnnnnnnnnnnnnnnnnnnnnnnnnnnnnnnnnnnnnnnnnnnnnnnnnnnnnnnnnnnnnnnnnnnnnnnnnnnnnnnnnnnnnnnnnnnnnnnnnnnnnnnnnnnnnnnnnnnnnnnnnnnnnnnnnnnnnnnnnnnnnnnnnnnnnnnnnnnnnnnnnnnnnnnnnnnnnnnnnnnnnnnnnnnnnnnnnnnnnnnnnnnnnnnnnnnnnnnnnnnnnnnnnnnnnnnnnnnnnnnnnnnnnnnnnnnnnnnnnnnnnnnnnnnnnnnnnnnnnnnnnnnnnnnnnnnnnnnnnnnnnnnnnnnnnnnnnnnnnnnnnnnnnnnnnnnnnnnnnnnnnnnnnnnnnnnnnnnnnnnnnnnnnnnnnnnnnnnnnnnnnnnnnnnnnnnnnnnnnnnnnnnnnnnnnnnnnnnnnnnnnnnnnnnnnnnnnnnnnnnnnnnnnnnnnnnnnnnnnnnnnnnnnnnnnnnnnnnnnnnnnnnnnnnnnnnnnnnnnnnnnnnnnnnnnnnnnnnnnnnnnnnnnnnnnnnnnnnnnnnnnnnnnnnnnnnnnnnnnnnnnnnnnnnnnnnnnnnnnnnnnnnnnnnnnnnnnnnnnnnnnnnnnnnnnnnnnnnnnnnnnnnnnnnnnnnnnnnnnnnnnnnnnnnnnnnnnnnnnnnnnnnnnnnnnnnnnnnnnnnnnnnnnnnnnnnnnnnnnnnnnnnnnnnnnnnnnnnnnnnnnnnnnnnnnnnnnnnnnnnnnnnnnnnnnnnnnnnnnnnnnnnnnnnnnnnnnnnnnnnnnnnnnnnnnnnnnnnnnnnnnnnnnnnnnnnnnnnnnnnnnnnnnnnnnnnnnnnnnnnnnnnnnnnnnnnnnnnnnnnnnnnnnnnnnnnnnnnnnnnnnnnnnnnnnnnnnnnnnnnnnnnnnnnnnnnnnnnnnnnnnnnnnnnnnnnnnnnnnnnnnnnnnnnnnnnnnnnnnnnnnnnnnnnnnnnnnnnnnnnnnnnnnnnnnnnnnnnnnnnnnnnnnnnnnnnnnnnnnnnnnnnnnnnnnnnnnnnnnnnnnnnnnnnnnnnnnnnnnnnnnnnnnnnnnnnnnnnnnnnnnnnnnnnnnnnnnnnnnnnnnnnnnnnnnnnnnnnnnnnnnnnnnnnnnnnnnnnnnnnnnnnnnnnnnnnnnnnnnnnnnnnnnnnnnnnnnnnnnnnnnnnnnnnnnnnnnnnnnnnnnnnnnnnnnnnnnnnnnnnnnnnnnnnnnnnnnnnnnnnnnnnnnnnnnnnnnnnnnnnnnnnnnnnnnnnnnnnnnnnnnnnnnnnnnnnnnnnnnnnnnnnnnnnnnnnnnnnnnnnnnnnnnnnnnnnnnnnnnnnnnnnnnnnnnnnnnnnnnnnnnnnnnnnnnnnnnnnnnnnnnnnnnnnnnnnnnnnnnnnnnnnnnnnnnnnnnnnnnnnnnnnnnnnnnnnnnnnnnnnnnnnnnnnnnnnnnnnnnnnnnnnnnnnnnnnnnnnnnnnnnnnnnnnnnnnnnnnnnnnnnnnnnnnnnnnnnnnnnnnnnnnnnnnnnnnnnnnnnnnnnnnnnnnnnnnnnnnnnnnnnnnnnnnnnnnnnnnnnnnnnnnnnnnnnnnnnnnnnnnnnnnnnnnnnnnnnnnnnnnnnnnnnnnnnnnnnnnnnnnnnnnnnnnnnnnnnnnnnnnnnnnnnnnnnnnnnnnnnnnnnnnnnnnnnnnnnnnnnnnnnnnnnnnnnnnnnnnnnnnnnnnnnnnnnnnnnnnnnnnnnnnnnnnnnnnnnnnnnnnnnnnnnnnnnnnnnnnnnnnnnnnnnnnnnnnnnnnnnnnnnnnnnnnnnnnnnnnnnnnnnnnnnnnnnnnnnnnnnnnnnnnnnnnnnnnnnnnnnnnnnnnnnnnnnnnnnnnnnnnnnnnnnnnnnnnnnnnnnnnnnnnnnnnnnnnnnnnnnnnnnnnnnnnnnnnnnnnnnnnnnnnnnnnnnnnnnnnnnnnnnnnnnnnnnnnnnnnnnnnnnnnnnnnnnnnnnnnnnnnnnnnnnnnnnnnnnnnnnnnnnnnnnnnnnnnnnnnnnnnnnnnnnnnnnnnnnnnnnnnnnnnnnnnnnnnnnnnnnnnnnnnnnnnnnnnnnnnnnnnnnnnnnnnnnnnnnnnnnnnnnnnnnnnnnnnnnnnnnnnnnnnnnnnnnnnnnnnnnnnnnnnnnnnnnnnnnnnnnnnnnnnnnnnnnnnnnnnnnnnnnnnnnnnnnnnnnnnnnnnnnnnnnnnnnnnnnnnnnnnnnnnnnnnnnnnnnnnnnnnnnnnnnnnnnnnnnnnnnnnnnnnnnnnnnnnnnnnnnnnnnnnnnnnnnnnnnnnnnnnnnnnnnnnnnnnnnnnnnnnnnnnnnnnnnnnnnnnnnnnnnnnnnnnnnnnnnnnnnnnnnnnnnnnnnnnnnnnnnnnnnnnnnnnnnnnnnnnnnnnnnnnnnnnnnnnnnnnnnnnnnnnnnnnnnnnnnnnnnnnnnnnnnnnnnnnnnnnnnnnnnnnnnnnnnnnnnnnnnnnnnnnnnnnnnnnnnnnnnnnnnnnnnnnnnnnnnnnnnnnnnnnnnnnnnnnnnnnnnnnnnnnnnnnnnnnnnnnnnnnnnnnnnnnnnnnnnnnnnnnnnnnnnnnnnnnnnnnnnnnnnnnnnnnnnnnnnnnnnnnnnnnnnnnnnnnnnnnnnnnnnnnnnnnnnnnnnnnnnnnnnnnnnnnnnnnnnnnnnnnnnnnnnnnnnnnnnnnnnnnnnnnnnnnnnnnnnnnnnnnnnnnnnnnnnnnnnnnnnnnnnnnnnnnnnnnnnnnnnnnnnnnnnnnnnnnnnnnnnnnnnnnnnnnnnnnnnnnnnnnnnnnnnnnnnnnnnnnnnnnnnnnnnnnnnnnnnnnnnnnnnnnnnnnnnnnnnnnnnnnnnnnnnnnnnnnnnnnnnnnnnnnnnnnnnnnnnnnnnnnnnnnnnnnnnnnnnnnnnnnnnnnnnnnnnnnnnnnnnnnnnnnnnnnnnnnnnnnnnnnnnnnnnnnnnnnnnnnnnnnnnnnnnnnnnnnnnnnnnnnnnnnnnnnnnnnnnnnnnnnnnnnnnnnnnnnnnnnnnnnnnnnnnnnnnnnnnnnnnnnnnnnnnnnnnnnnnnnnnnnnnnnnnnnnnnnnnnnnnnnnnnnnnnnnnnnnnnnnnnnnnnnnnnnnnnnnnnnnnnnnnnnnnnnnnnnnnnnnnnnnnnnnnnnnnnnnnnnnnnnnnnnnnnnnnnnnnnnnnnnnnnnnnnnnnnnnnnnnnnnnnnnnnnnnnnnnnnnnnnnnnnnnnnnnnnnnnnnnnnnnnnnnnnnnnnnnnnnnnnnnnnnnnnnnnnnnnnnnnnnnnnnnnnnnnnnnnnnnnnnnnnnnnnnnnnnnnnnnnnnnnnnnnnnnnnnnnnnnnnnnnnnnnnnnnnnnnnnnnnnnnnnnnnnnnnnnnnnnnnnnnnnnnnnnnnnnnnnnnnnnnnnnnnnnnnnnnnnnnnnnnnnnnnnnnnnnnnnnnnnnnnnnnnnnnnnnnnnnnnnnnnnnnnnnnnnnnnnnnnnnnnnnnnnnnnnnnnnnnnnnnnnnnnnnnnnnnnnnnnnnnnnnnnnnnnnnnnnnnnnnnnnnnnnnnnnnnnnnnnnnnnnnnnnnnnnnnnnnnnnnnnnnnnnnnnnnnnnnnnnnnnnnnnnnnnnnnnnnnnnnnnnnnnnnnnnnnnnnnnnnnnnnnnnnnnnnnnnnnnnnnnnnnnnnnnnnnnnnnnnnnnnnnnnnnnnnnnnnnnnnnnnnnnnnnnnnnnnnnnnnnnnnnnnnnnnnnnnnnnnnnnnnnnnnnnnnnnnnnnnnnnnnnnnnnnnnnnnnnnnnnnnnnnnnnnnnnnnnnnnnnnnnnnnnnnnnnnnnnnnnnnnnnnnnnnnnnnnnnnnnnnnnnnnnnnnnnnnnnnnnnnnnnnnnnnnnnnnnnnnnnnnnnnnnnnnnnnnnnnnnnnnnnnnnnnnnnnnnnnnnnnnnnnnnnnnnnnnnnnnnnnnnnnnnnnnnnnnnnnnnnnnnnnnnnnnnnnnnnnnnnnnnnnnnnnnnnnnnnnnnnnnnnnnnnnnnnnnnnnnnnnnnnnnnnnnnnnnnnnnnnnnnnnnnnnnnnnnnnnnnnnnnnnnnnnnnnnnnnnnnnnnnnnnnnnnnnnnnnnnnnnnnnnnnnnnnnnnnnnnnnnnnnnnnnnnnnnnnnnnnnnnnnnnnnnnnnnnnnnnnnnnnnnnnnnnnnnnnnnnnnnnnnnnnnnnnnnnnnnnnnnnnnnnnnnnnnnnnnnnnnnnnnnnnnnnnnnnnnnnnnnnnnnnnnnnnnnnnnnnnnnnnnnnnnnnnnnnnnnnnnnnnnnnnnnnnnnnnnnnnnnnnnnnnnnnnnnnnnnnnnnnnnnnnnnnnnnnnnnnnnnnnnnnnnnnnnnnnnnnnnnnnnnnnnnnnnnnnnnnnnnnnnnnnnnnnnnnnnnnnnnnnnnnnnnnnnnnnnnnnnnnnnnnnnnnnnnnnnnnnnnnnnnnnnnnnnnnnnnnnnnnnnnnnnnnnnnnnnnnnnnnnnnnnnnnnnnnnnnnnnnnnnnnnnnnnnnnnnnnnnnnnnnnnnnnnnnnnnnnnnnnnnnnnnnnnnnnnnnnnnnnnnnnnnnnnnnnnnnnnnnnnnnnnnnnnnnnnnnnnnnnnnnnnnnnnnnnnnnnnnnnnnnnnnnnnnnnnnnnnnnnnnnnnnnnnnnnnnnnnnnnnnnnnnnnnnnnnnnnnnnnnnnnnnnnnnnnnnnnnnnnnnnnnnnnnnnnnnnnnnnnnnnnnnnnnnnnnnnnnnnnnnnnnnnnnnnnnnnnnnnnnnnnnnnnnnnnnnnnnnnnnnnnnnnnnnnnnnnnnnnnnnnnnnnnnnnnnnnnnnnnnnnnnnnnnnnnnnnnnnnnnnnnnnnnnnnnnnnnnnnnnnnnnnnnnnnnnnnnnnnnnnnnnnnnnnnnnnnnnnnnnnnnnnnnnnnnnnnnnnnnnnnnnnnnnnnnnnnnnnnnnnnnnnnnnnnnnnnnnnnnnnnnnnnnnnnnnnnnnnnnnnnnnnnnnnnnnnnnnnnnnnnnnnnnnnnnnnnnnnnnnnnnnnnnnnnnnnnnnnnnnnnnnnnnnnnnnnnnnnnnnnnnnnnnnnnnnnnnnnnnnnnnnnnnnnnnnnnnnnnnnnnnnnnnnnnnnnnnnnnnnnnnnnnnnnnnnnnnnnnnnnnnnnnnnnnnnnnnnnnnnnnnnnnnnnnnnnnnnnnnnnnnnnnnnnnnnnnnnnnnnnnnnnnnnnnnnnnnnnnnnnnnnnnnnnnnnnnnnnnnnnnnnnnnnnnnnnnnnnnnnnnnnnnnnnnnnnnnnnnnnnnnnnnnnnnnnnnnnnnnnnnnnnnnnnnnnnnnnnnnnnnnnnnnnnnnnnnnnnnnnnnnnnnnnnnnnnnnnnnnnnnnnnnnnnnnnnnnnnnnnnnnnnnnnnnnnnnnnnnnnnnnnnnnnnnnnnnnnnnnnnnnnnnnnnnnnnnnnnnnnnnnnnnnnnnnnnnnnnnnnnnnnnnnnnnnnnnnnnnnnnnnnnnnnnnnnnnnnnnnnnnnnnnnnnnnnnnnnnnnnnnnnnnnnnnnnnnnnnnnnnnnnnnnnnnnnnnnnnnnnnnnnnnnnnnnnnnnnnnnnnnnnnnnnnnnnnnnnnnnnnnnnnnnnnnnnnnnnnnnnnnnnnnnnnnnnnnnnnnnnnnnnnnnnnnnnnnnnnnnnnnnnnnnnnnnnnnnnnnnnnnnnnnnnnnnnnnnnnnnnnnnnnnnnnnnnnnnnnnnnnnnnnnnnnnnnnnnnnnnnnnnnnnnnnnnnnnnnnnnnnnnnnnnnnnnnnnnnnnnnnnnnnnnnnnnnnnnnnnnnnnnnnnnnnnnnnnnnnnnnnnnnnnnnnnnnnnnnnnnnnnnnnnnnnnnnnnnnnnnnnnnnnnnnnnnnnnnnnnnnnnnnnnnnnnnnnnnnnnnnnnnnnnnnnnnnnnnnnnnnnnnnnnnnnnnnnnnnnnnnnnnnnnnnnnnnnnnnnnnnnnnnnnnnnnnnnnnnnnnnnnnnnnnnnnnnnnnnnnnnnnnnnnnnnnnnnnnnnnnnnnnnnnnnnnnnnnnnnnnnnnnnnnnnnnnnnnnnnnnnnnnnnnnnnnnnnnnnnnnnnnnnnnnnnnnnnnnnnnnnnnnnnnnnnnnnnnnnnnnnnnnnnnnnnnnnnnnnnnnnnnnnnnnnnnnnnnnnnnnnnnnnnnnnnnnnnnnnnnnnnnnnnnnnnnnnnnnnnnnnnnnnnnnnnnnnnnnnnnnnnnnnnnnnnnnnnnnnnnnnnnnnnnnnnnnnnnnnnnnnnnnnnnnnnnnnnnnnnnnnnnnnnnnnnnnnnnnnnnnnnnnnnnnnnnnnnnnnnnnnnnnnnnnnnnnnnnnnnnnnnnnnnnnnnnnnnnnnnnnnnnnnnnnnnnnnnnnnnnnnnnnnnnnnnnnnnnnnnnnnnnnnnnnnnnnnnnnnnnnnnnnnnnnnnnnnnnnnnnnnnnnnnnnnnnnnnnnnnnnnnnnnnnnnnnnnnnnnnnnnnnnnnnnnnnnnnnnnnnnnnnnnnnnnnnnnnnnnnnnnnnnnnnnnnnnnnnnnnnnnnnnnnnnnnnnnnnnnnnnnnnnnnnnnnnnnnnnnnnnnnnnnnnnnnnnnnnnnnnnnnnnnnnnnnnnnnnnnnnnnnnnnnnnnnnnnnnnnnnnnnnnnnnnnnnnnnnnnnnnnnnnnnnnnnnnnnnnnnnnnnnnnnnnnnnnnnnnnnnnnnnnnnnnnnnnnnnnnnnnnnnnnnnnnnnnnnnnnnnnnnnnnnnnnnnnnnnnnnnnnnnnnnnnnnnnnnnnnnnnnnnnnnnnnnnnnnnnnnnnnnnnnnnnnnnnnnnnnnnnnnnnnnnnnnnnnnnnnnnnnnnnnnnnnnnnnnnnnnnnnnnnnnnnnnnnnnnnnnnnnnnnnnnnnnnnnnnnnnnnnnnnnnnnnnnnnnnnnnnnnnnnnnnnnnnnnnnnnnnnnnnnnnnnnnnnnnnnnnnnnnnnnnnnnnnnnnnnnnnnnnnnnnnnnnnnnnnnnnnnnnnnnnnnnnnnnnnnnnnnnnnnnnnnnnnnnnnnnnnnnnnnnnnnnnnnnnnnnnnnnnnnnnnnnnnnnnnnnnnnnnnnnnnnnnnnnnnnnnnnnnnnnnnnnnnnnnnnnnnnnnnnnnnnnnnnnnnnnnnnnnnnnnnnnnnnnnnnnnnnnnnnnnnnnnnnnnnnnnnnnnnnnnnnnnnnnnnnnnnnnnnnnnnnnnnnnnnnnnnnnnnnnnnnnnnnnnnnnnnnnnnnnnnnnnnnnnnnnnnnnnnnnnnnnnnnnnnnnnnnnnnnnnnnnnnnnnnnnnnnnnnnnnnnnnnnnnnnnnnnnnnnnnnnnnnnnnnnnnnnnnnnnnnnnnnnnnnnnnnnnnnnnnnnnnnnnnnnnnnnnnnnnnnnnnnnnnnnnnnnnnnnnnnnnnnnnnnnnnnnnnnnnnnnnnnnnnnnnnnnnnnnnnnnnnnnnnnnnnnnnnnnnnnnnnnnnnnnnnnnnnnnnnnnnnnnnnnnnnnnnnnnnnnnnnnnnnnnnnnnnnnnnnnnnnnnnnnnnnnnnnnnnnnnnnnnnnnnnnnnnnnnnnnnnnnnnnnnnnnnnnnnnnnnnnnnnnnnnnnnnnnnnnnnnnnnnnnnnnnnnnnnnnnnnnnnnnnnnnnnnnnnnnnnnnnnnnnnnnnnnnnnnnnnnnnnnnnnnnnnnnnnnnnnnnnnnnnnnnnnnnnnnnnnnnnnnnnnnnnnnnnnnnnnnnnnnnnnnnnnnnnnnnnnnnnnnnnnnnnnnnnnnnnnnnnnnnnnnnnnnnnnnnnnnnnnnnnnnnnnnnnnnnnnnnnnnnnnnnnnnnnnnnnnnnnnnnnnnnnnnnnnnnnnnnnnnnnnnnnnnnnnnnnnnnnnnnnnnnnnnnnnnnnnnnnnnnnnnnnnnnnnnnnnnnnnnnnnnnnnnnnnnnnnnnnnnnnnnnnnnnnnnnnnnnnnnnnnnnnnnnnnnnnnnnnnnnnnnnnnnnnnnnnnnnnnnnnnnnnnnnnnnnnnnnnnnnnnnnnnnnnnnnnnnnnnnnnnnnnnnnnnnnnnnnnnnnnnnnnnnnnnnnnnnnnnnnnnnnnnnnnnnnnnnnnnnnnnnnnnnnnnnnnnnnnnnnnnnnnnnnnnnnnnnnnnnnnnnnnnnnnnnnnnnnnnnnnnnnnnnnnnnnnnnnnnnnnnnnnnnnnnnnnnnnnnnnnnnnnnnnnnnnnnnnnnnnnnnnnnnnnnnnnnnnnnnnnnnnnnnnnnnnnnnnnnnnnnnnnnnnnnnnnnnnnnnnnnnnnnnnnnnnnnnnnnnnnnnnnnnnnnnnnnnnnnnnnnnnnnnnnnnnnnnnnnnnnnnnnnnnnnnnnnnnnnnnnnnnnnnnnnnnnnnnnnnnnnnnnnnnnnnnnnnnnnnnnnnnnnnnnnnnnnnnnnnnnnnnnnnnnnnnnnnnnnnnnnnnnnnnnnnnnnnnnnnnnnnnnnnnnnnnnnnnnnnnnnnnnnnnnnnnnnnnnnnnnnnnnnnnnnnnnnnnnnnnnnnnnnnnnnnnnnnnnnnnnnnnnnnnnnnnnnnnnnnnnnnnnnnnnnnnnnnnnnnnnnnnnnnnnnnnnnnnnnnnnnnnnnnnnnnnnnnnnnnnnnnnnnnnnnnnnnnnnnnnnnnnnnnnnnnnnnnnnnnnnnnnnnnnnnnnnnnnnnnnnnnnnnnnnnnnnnnnnnnnnnnnnnnnnnnnnnnnnnnnnnnnnnnnnnnnnnnnnnnnnnnnnnnnnnnnnnnnnnnnnnnnnnnnnnnnnnnnnnnnnnnnnnnnnnnnnnnnnnnnnnnnnnnnnnnnnnnnnnnnnnnnnnnnnnnnnnnnnnnnnnnnnnnnnnnnnnnnnnnnnnnnnnnnnnnnnnnnnnnnnnnnnnnnnnnnnnnnnnnnnnnnnnnnnnnnnnnnnnnnnnnnnnnnnnnnnnnnnnnnnnnnnnnnnnnnnnnnnnnnnnnnnnnnnnnnnnnnnnnnnnnnnnnnnnnnnnnnnnnnnnnnnnnnnnnnnnnnnnnnnnnnnnnnnnnnnnnnnnnnnnnnnnnnnnnnnnnnnnnnnnnnnnnnnnnnnnnnnnnnnnnnnnnnnnnnnnnnnnnnnnnnnnnnnnnnnnnnnnnnnnnnnnnnnnnnnnnnnnnnnnnnnnnnnnnnnnnnnnnnnnnnnnnnnnnnnnnnnnnnnnnnnnnnnnnnnnnnnnnnnnnnnnnnnnnnnnnnnnnnnnnnnnnnnnnnnnnnnnnnnnnnnnnnnnnnnnnnnnnnnnnnnnnnnnnnnnnnnnnnnnnnnnnnnnnnnnnnnnnnnnnnnnnnnnnnnnnnnnnnnnnnnnnnnnnnnnnnnnnnnnnnnnnnnnnnnnnnnnnnnnnnnnnnnnnnnnnnnnnnnnnnnnnnnnnnnnnnnnnnnnnnnnnnnnnnnnnnnnnnnnnnnnnnnnnnnnnnnnnnnnnnnnnnnnnnnnnnnnnnnnnnnnnnnnnnnnnnnnnnnnnnnnnnnnnnnnnnnnnnnnnnnnnnnnnnnnnnnnnnnnnnnnnnnnnnnnnnnnnnnnnnnnnnnnnnnnnnnnnnnnnnnnnnnnnnnnnnnnnnnnnnnnnnnnnnnnnnnnnnnnnnnnnnnnnnnnnnnnnnnnnnnnnnnnnnnnnnnnnnnnnnnnnnnnnnnnnnnnnnnnnnnnnnnnnnnnnnnnnnnnnnnnnnnnnnnnnnnnnnnnnnnnnnnnnnnnnnnnnnnnnnnnnnnnnnnnnnnnnnnnnnnnnnnnnnnnnnnnnnnnnnnnnnnnnnnnnnnnnnnnnnnnnnnnnnnnnnnnnnnnnnnnnnnnnnnnnnnnnnnnnnnnnnnnnnnnnnnnnnnnnnnnnnnnnnnnnnnnnnnnnnnnnnnnnnnnnnnnnnnnnnnnnnnnnnnnnnnnnnnnnnnnnnnnnnnnnnnnnnnnnnnnnnnnnnnnnnnnnnnnnnnnnnnnnnnnnnnnnnnnnnnnnnnnnnnnnnnnnnnnnnnnnnnnnnnnnnnnnnnnnnnnnnnnnnnnnnnnnnnnnnnnnnnnnnnnnnnnnnnnnnnnnnnnnnnnnnnnnnnnnnnnnnnnnnnnnnnnnnnnnnnnnnnnnnnnnnnnnnnnnnnnnnnnnnnnnnnnnnnnnnnnnnnnnnnnnnnnnnnnnnnnnnnnnnnnnnnnnnnnnnnnnnnnnnnnnnnnnnnnnnnnnnnnnnnnnnnnnnnnnnnnnnnnnnnnnnnnnnnnnnnnnnnnnnnnnnnnnnnnnnnnnnnnnnnnnnnnnnnnnnnnnnnnnnnnnnnnnnnnnnnnnnnnnnnnnnnnnnnnnnnnnnnnnnnnnnnnnnnnnnnnnnnnnnnnnnnnnnnnnnnnnnnnnnnnnnnnnnnnnnnnnnnnnnnnnnnnnnnnnnnnnnnnnnnnnnnnnnnnnnnnnnnnnnnnnnnnnnnnnnnnnnnnnnnnnnnnnnnnnnnnnnnnnnnnnnnnnnnnnnnnnnnnnnnnnnnnnnnnnnnnnnnnnnnnnnnnnnnnnnnnnnnnnnnnnnnnnnnnnnnnnnnnnnnnnnnnnnnnnnnnnnnnnnnnnnnnnnnnnnnnnnnnnnnnnnnnnnnnnnnnnnnnnnnnnnnnnnnnnnnnnnnnnnnnnnnnnnnnnnnnnnnnnnnnnnnnnnnnnnnnnnnnnnnnnnnnnnnnnnnnnnnnnnnnnnnnnnnnnnnnnnnnnnnnnnnnnnnnnnnnnnnnnnnnnnnnnnnnnnnnnnnnnnnnnnnnnnnnnnnnnnnnnnnnnnnnnnnnnnnnnnnnnnnnnnnnnnnnnnnnnnnnnnnnnnnnnnnnnnnnnnnnnnnnnnnnnnnnnnnnnnnnnnnnnnnnnnnnnnnnnnnnnnnnnnnnnnnnnnnnnnnnnnnnnnnnnnnnnnnnnnnnnnnnnnnnnnnnnnnnnnnnnnnnnnnnnnnnnnnnnnnnnnnnnnnnnnnnnnnnnnnnnnnnnnnnnnnnnnnnnnnnnnnnnnnnnnnnnnnnnnnnnnnnnnnnnnnnnnnnnnnnnnnnnnnnnnnnnnnnnnnnnnnnnnnnnnnnnnnnnnnnnnnnnnnnnnnnnnnnnnnnnnnnnnnnnnnnnnnnnnnnnnnnnnnnnnnnnnnnnnnnnnnnnnnnnnnnnnnnnnnnnnnnnnnnnnnnnnnnnnnnnnnnnnnnnnnnnnnnnnnnnnnnnnnnnnnnnnnnnnnnnnnnnnnnnnnnnnnnnnnnnnnnnnnnnnnnnnnnnnnnnnnnnnnnnnnnnnnnnnnnnnnnnnnnnnnnnnnnnnnnnnnnnnnnnnnnnnnnnnnnnnnnnnnnnnnnnnnnnnnnnnnnnnnnnnnnnnnnnnnnnnnnnnnnnnnnnnnnnnnnnnnnnnnnnnnnnnnnnnnnnnnnnnnnnnnnnnnnnnnnnnnnnnnnnnnnnnnnnnnnnnnnnnnnnnnnnnnnnnnnnnnnnnnnnnnnnnnnnnnnnnnnnnnnnnnnnnnnnnnnnnnnnnnnnnnnnnnnnnnnnnnnnnnnnnnnnnnnnnnnnnnnnnnnnnnnnnnnnnnnnnnnnnnnnnnnnnnnnnnnnnnnnnnnnnnnnnnnnnnnnnnnnnnnnnnnnnnnnnnnnnnnnnnnnnnnnnnnnnnnnnnnnnnnnnnnnnnnnnnnnnnnnnnnnnnnnnnnnnnnnnnnnnnnnnnnnnnnnnnnnnnnnnnnnnnnnnnnnnnnnnnnnnnnnnnnnnnnnnnnnnnnnnnnnnnnnnnnnnnnnnnnnnnnnnnnnnnnnnnnnnnnnnnnnnnnnnnnnnnnnnnnnnnnnnnnnnnnnnnnnnnnnnnnnnnnnnnnnnnnnnnnnnnnnnnnnnnnnnnnnnnnnnnnnnnnnnnnnnnnnnnnnnnnnnnnnnnnnnnnnnnnnnnnnnnnnnnnnnnnnnnnnnnnnnnnnnnnnnnnnnnnnnnnnnnnnnnnnnnnnnnnnnnnnnnnnnnnnnnnnnnnnnnnnnnnnnnnnnnnnnnnnnnnnnnnnnnnnnnnnnnnnnnnnnnnnnnnnnnnnnnnnnnnnnnnnnnnnnnnnnnnnnnnnnnnnnnnnnnnnnnnnnnnnnnnnnnnnnnnnnnnnnnnnnnnnnnnnnnnnnnnnnnnnnnnnnnnnnnnnnnnnnnnnnnnnnnnnnnnnnnnnnnnnnnnnnnnnnnnnnnnnnnnnnnnnnnnnnnnnnnnnnnnnnnnnnnnnnnnnnnnnnnnnnnnnnnnnnnnnnnnnnnnnnnnnnnnnnnnnnnnnnnnnnnnnnnnnnnnnnnnnnnnnnnnnnnnnnnnnnnnnnnnnnnnnnnnnnnnnnnnnnnnnnnnnnnnnnnnnnnnnnnnnnnnnnnnnnnnnnnnnnnnnnnnnnnnnnnnnnnnnnnnnnnnnnnnnnnnnnnnnnnnnnnnnnnnnnnnnnnnnnnnnnnnnnnnnnnnnnnnnnnnnnnnnnnnnnnnnnnnnnnnnnnnnnnnnnnnnnnnnnnnnnnnnnnnnnnnnnnnnnnnnnnnnnnnnnnnnnnnnnnnnnnnnnnnnnnnnnnnnnnnnnnnnnnnnnnnnnnnnnnnnnnnnnnnnnnnnnnnnnnnnnnnnnnnnnnnnnnnnnnnnnnnnnnnnnnnnnnnnnnnnnnnnnnnnnnnnnnnnnnnnnnnnnnnnnnnnnnnnnnnnnnnnnnnnnnnnnnnnnnnnnnnnnnnnnnnnnnnnnnnnnnnnnnnnnnnnnnnnnnnnnnnnnnnnnnnnnnnnnnnnnnnnnnnnnnnnnnnnnnnnnnnnnnnnnnnnnnnnnnnnnnnnnnnnnnnnnnnnnnnnnnnnnnnnnnnnnnnnnnnnnnnnnnnnnnnnnnnnnnnnnnnnnnnnnnnnnnnnnnnnnnnnnnnnnnnnnnnnnnnnnnnnnnnnnnnnnnnnnnnnnnnnnnnnnnnnnnnnnnnnnnnnnnnnnnnnnnnnnnnnnnnnnnnnnnnnnnnnnnnnnnnnnnnnnnnnnnnnnnnnnnnnnnnnnnnnnnnnnnnnnnnnnnnnnnnnnnnnnnnnnnnnnnnnnnnnnnnnnnnnnnnnnnnnnnnnnnnnnnnnnnnnnnnnnnnnnnnnnnnnnnnnnnnnnnnnnnnnnnnnnnnnnnnnnnnnnnnnnnnnnnnnnnnnnnnnnnnnnnnnnnnnnnnnnnnnnnnnnnnnnnnnnnnnnnnnnnnnnnnnnnnnnnnnnnnnnnnnnnnnnnnnnnnnnnnnnnnnnnnnnnnnnnnnnnnnnnnnnnnnnnnnnnnnnnnnnnnnnnnnnnnnnnnnnnnnnnnnnnnnnnnnnnnnnnnnnnnnnnnnnnnnnnnnnnnnnnnnnnnnnnnnnnnnnnnnnnnnnnnnnnnnnnnnnnnnnnnnnnnnnnnnnnnnnnnnnnnnnnnnnnnnnnnnnnnnnnnnnnnnnnnnnnnnnnnnnnnnnnnnnnnnnnnnnnnnnnnnnnnnnnnnnnnnnnnnnnnnnnnnnnnnnnnnnnnnnnnnnnnnnnnnnnnnnnnnnnnnnnnnnnnnnnnnnnnnnnnnnnnnnnnnnnnnnnnnnnnnnnnnnnnnnnnnnnnnnnnnnnnnnnnnnnnnnnnnnnnnnnnnnnnnnnnnnnnnnnnnnnnnnnnnnnnnnnnnnnnnnnnnnnnnnnnnnnnnnnnnnnnnnnnnnnnnnnnnnnnnnnnnnnnnnnnnnnnnnnnnnnnnnnnnnnnnnnnnnnnnnnnnnnnnnnnnnnnnnnnnnnnnnnnnnnnnnnnnnnnnnnnnnnnnnnnnnnnnnnnnnnnnnnnnnnnnnnnnnnnnnnnnnnnnnnnnnnnnnnnnnnnnnnnnnnnnnnnnnnnnnnnnnnnnnnnnnnnnnnnnnnnnnnnnnnnnnnnnnnnnnnnnnnnnnnnnnnnnnnnnnnnnnnnnnnnnnnnnnnnnnnnnnnnnnnnnnnnnnnnnnnnnnnnnnnnnnnnnnnnnnnnnnnnnnnnnnnnnnnnnnnnnnnnnnnnnnnnnnnnnnnnnnnnnnnnnnnnnnnnnnnnnnnnnnnnnnnnnnnnnnnnnnnnnnnnnnnnnnnnnnnnnnnnnnnnnnnnnnnnnnnnnnnnnnnnnnnnnnnnnnnnnnnnnnnnnnnnnnnnnnnnnnnnnnnnnnnnnnnnnnnnnnnnnnnnnnnnnnnnnnnnnnnnnnnnnnnnnnnnnnnnnnnnnnnnnnnnnnnnnnnnnnnnnnnnnnnnnnnnnnnnnnnnnnnnnnnnnnnnnnnnnnnnnnnnnnnnnnnnnnnnnnnnnnnnnnnnnnnnnnnnnnnnnnnnnnnnnnnnnnnnnnnnnnnnnnnnnnnnnnnnnnnnnnnnnnnnnnnnnnnnnnnnnnnnnnnnnnnnnnnnnnnnnnnnnnnnnnnnnnnnnnnnnnnnnnnnnnnnnnnnnnnnnnnnnnnnnnnnnnnnnnnnnnnnnnnnnnnnnnnnnnnnnnnnnnnnnnnnnnnnnnnnnnnnnnnnnnnnnnnnnnnnnnnnnnnnnnnnnnnnnnnnnnnnnnnnnnnnnnnnnnnnnnnnnnnnnnnnnnnnnnnnnnnnnnnnnnnnnnnnnnnnnnnnnnnnnnnnnnnnnnnnnnnnnnnnnnnnnnnnnnnnnnnnnnnnnnnnnnnnnnnnnnnnnnnnnnnnnnnnnnnnnnnnnnnnnnnnnnnnnnnnnnnnnnnnnnnnnnnnnnnnnnnnnnnnnnnnnnnnnnnnnnnnnnnnnnnnnnnnnnnnnnnnnnnnnnnnnnnnnnnnnnnnnnnnnnnnnnnnnnnnnnnnnnnnnnnnnnnnnnnnnnnnnnnnnnnnnnnnnnnnnnnnnnnnnnnnnnnnnnnnnnnnnnnnnnnnnnnnnnnnnnnnnnnnnnnnnnnnnnnnnnnnnnnnnnnnnnnnnnnnnnnnnnnnnnnnnnnnnnnnnnnnnnnnnnnnnnnnnnnnnnnnnnnnnnnnnnnnnnnnnnnnnnnnnnnnnnnnnnnnnnnnnnnnnnnnnnnnnnnnnnnnnnnnnnnnnnnnnnnnnnnnnnnnnnnnnnnnnnnnnnnnnnnnnnnnnnnnnnnnnnnnnnnnnnnnnnnnnnnnnnnnnnnnnnnnnnnnnnnnnnnnnnnnnnnnnnnnnnnnnnnnnnnnnnnnnnnnnnnnnnnnnnnnnnnnnnnnnnnnnnnnnnnnnnnnnnnnnnnnnnnnnnnnnnnnnnnnnnnnnnnnnnnnnnnnnnnnnnnnnnnnnnnnnnnnnnnnnnnnnnnnnnnnnnnnnnnnnnnnnnnnnnnnnnnnnnnnnnnnnnnnnnnnnnnnnnnnnnnnnnnnnnnnnnnnnnnnnnnnnnnnnnnnnnnnnnnnnnnnnnnnnnnnnnnnnnnnnnnnnnnnnnnnnnnnnnnnnnnnnnnnnnnnnnnnnnnnnnnnnnnnnnnnnnnnnnnnnnnnnnnnnnnnnnnnnnnnnnnnnnnnnnnnnnnnnnnnnnnnnnnnnnnnnnnnnnnnnnnnnnnnnnnnnnnnnnnnnnnnnnnnnnnnnnnnnnnnnnnnnnnnnnnnnnnnnnnnnnnnnnnnnnnnnnnnnnnnnnnnnnnnnnnnnnnnnnnnnnnnnnnnnnnnnnnnnnnnnnnnnnnnnnnnnnnnnnnnnnnnnnnnnnnnnnnnnnnnnnnnnnnnnnnnnnnnnnnnnnnnnnnnnnnnnnnnnnnnnnnnnnnnnnnnnnnnnnnnnnnnnnnnnnnnnnnnnnnnnnnnnnnnnnnnnnnnnnnnnnnnnnnnnnnnnnnnnnnnnnnnnnnnnnnnnnnnnnnnnnnnnnnnnnnnnnnnnnnnnnnnnnnnnnnnnnnnnnnnnnnnnnnnnnnnnnnnnnnnnnnnnnnnnnnnnnnnnnnnnnnnnnnnnnnnnnnnnnnnnnnnnnnnnnnnnnnnnnnnnnnnnnnnnnnnnnnnnnnnnnnnnnnnnnnnnnnnnnnnnnnnnnnnnnnnnnnnnnnnnnnnnnnnnnnnnnnnnnnnnnnnnnnnnnnnnnnnnnnnnnnnnnnnnnnnnnnnnnnnnnnnnnnnnnnnnnnnnnnnnnnnnnnnnnnnnnnnnnnnnnnnnnnnnnnnnnnnnnnnnnnnnnnnnnnnnnnnnnnnnnnnnnnnnnnnnnnnnnnnnnnnnnnnnnnnnnnnnnnnnnnnnnnnnnnnnnnnnnnnnnnnnnnnnnnnnnnnnnnnnnnnnnnnnnnnnnnnnnnnnnnnnnnnnnnnnnnnnnnnnnnnnnnnnnnnnnnnnnnnnnnnnnnnnnnnnnnnnnnnnnnnnnnnnnnnnnnnnnnnnnnnnnnnnnnnnnnnnnnnnnnnnnnnnnnnnnnnnnnnnnnnnnnnnnnnnnnnnnnnnnnnnnnnnnnnnnnnnnnnnnnnnnnnnnnnnnnnnnnnnnnnnnnnnnnnnnnnnnnnnnnnnnnnnnnnnnnnnnnnnnnnnnnnnnnnnnnnnnnnnnnnnnnnnnnnnnnnnnnnnnnnnnnnnnnnnnnnnnnnnnnnnnnnnnnnnnnnnnnnnnnnnnnnnnnnnnnnnnnnnnnnnnnnnnnnnnnnnnnnnnnnnnnnnnnnnnnnnnnnnnnnnnnnnnnnnnnnnnnnnnnnnnnnnnnnnnnnnnnnnnnnnnnnnnnnnnnnnnnnnnnnnnnnnnnnnnnnnnnnnnnnnnnnnnnnnnnnnnnnnnnnnnnnnnnnnnnnnnnnnnnnnnnnnnnnnnnnnnnnnnnnnnnnnnnnnnnnnnnnnnnnnnnnnnnnnnnnnnnnnnnnnnnnnnnnnnnnnnnnnnnnnnnnnnnnnnnnnnnnnnnnnnnnnnnnnnnnnnnnnnnnnnnnnnnnnnnnnnnnnnnnnnnnnnnnnnnnnnnnnnnnnnnnnnnnnnnnnnnnnnnnnnnnnnnnnnnnnnnnnnnnnnnnnnnnnnnnnnnnnnnnnnnnnnnnnnnnnnnnnnnnnnnnnnnnnnnnnnnnnnnnnnnnnnnnnnnnnnnnnnnnnnnnnnnnnnnnnnnnnnnnnnnnnnnnnnnnnnnnnnnnnnnnnnnnnnnnnnnnnnnnnnnnnnnnnnnnnnnnnnnnnnnnnnnnnnnnnnnnnnnnnnnnnnnnnnnnnnnnnnnnnnnnnnnnnnnnnnnnnnnnnnnnnnnnnnnnnnnnnnnnnnnnnnnnnnnnnnnnnnnnnnnnnnnnnnnnnnnnnnnnnnnnnnnnnnnnnnnnnnnnnnnnnnnnnnnnnnnnnnnnnnnnnnnnnnnnnnnnnnnnnnnnnnnnnnnnnnnnnnnnnnnnnnnnnnnnnnnnnnnnnnnnnnnnnnnnnnnnnnnnnnnnnnnnnnnnnnnnnnnnnnnnnnnnnnnnnnnnnnnnnnnnnnnnnnnnnnnnnnnnnnnnnnnnnnnnnnnnnnnnnnnnnnnnnnnnnnnnnnnnnnnnnnnnnnnnnnnnnnnnnnnnnnnnnnnnnnnnnnnnnnnnnnnnnnnnnnnnnnnnnnnnnnnnnnnnnnnnnnnnnnnnnnnnnnnnnnnnnnnnnnnnnnnnnnnnnnnnnnnnnnnnnnnnnnnnnnnnnnnnnnnnnnnnnnnnnnnnnnnnnnnnnnnnnnnnnnnnnnnnnnnnnnnnnnnnnnnnnnnnnnnnnnnnnnnnnnnnnnnnnnnnnnnnnnnnnnnnnnnnnnnnnnnnnnnnnnnnnnnnnnnnnnnnnnnnnnnnnnnnnnnnnnnnnnnnnnnnnnnnnnnnnnnnnnnnnnnnnnnnnnnnnnnnnnnnnnnnnnnnnnnnnnnnnnnnnnnnnnnnnnnnnnnnnnnnnnnnnnnnnnnnnnnnnnnnnnnnnnnnnnnnnnnnnnnnnnnnnnnnnnnnnnnnnnnnnnnnnnnnnnnnnnnnnnnnnnnnnnnnnnnnnnnnnnnnnnnnnnnnnnnnnnnnnnnnnnnnnnnnnnnnnnnnnnnnnnnnnnnnnnnnnnnnnnnnnnnnnnnnnnnnnnnnnnnnnnnnnnnnnnnnnnnnnnnnnnnnnnnnnnnnnnnnnnnnnnnnnnnnnnnnnnnnnnnnnnnnnnnnnnnnnnnnnnnnnnnnnnnnnnnnnnnnnnnnnnnnnnnnnnnnnnnnnnnnnnnnnnnnnnnnnnnnnnnnnnnnnnnnnnnnnnnnnnnnnnnnnnnnnnnnnnnnnnnnnnnnnnnnnnnnnnnnnnnnnnnnnnnnnnnnnnnnnnnnnnnnnnnnnnnnnnnnnnnnnnnnnnnnnnnnnnnnnnnnnnnnnnnnnnnnnnnnnnnnnnnnnnnnnnnnnnnnnnnnnnnnnnnnnnnnnnnnnnnnnnnnnnnnnnnnnnnnnnnnnnnnnnnnnnnnnnnnnnnnnnnnnnnnnnnnnnnnnnnnnnnnnnnnnnnnnnnnnnnnnnnnnnnnnnnnnnnnnnnnnnnnnnnnnnnnnnnnnnnnnnnnnnnnnnnnnnnnnnnnnnnnnnnnnnnnnnnnnnnnnnnnnnnnnnnnnnnnnnnnnnnnnnnnnnnnnnnnnnnnnnnnnnnnnnnnnnnnnnnnnnnnnnnnnnnnnnnnnnnnnnnnnnnnnnnnnnnnnnnnnnnnnnnnnnnnnnnnnnnnnnnnnnnnnnnnnnnnnnnnnnnnnnnnnnnnnnnnnnnnnnnnnnnnnnnnnnnnnnnnnnnnnnnnnnnnnnnnnnnnnnnnnnnnnnnnnnnnnnnnnnnnnnnnnnnnnnnnnnnnnnnnnnnnnnnnnnnnnnnnnnnnnnnnnnnnnnnnnnnnnnnnnnnnnnnnnnnnnnnnnnnnnnnnnnnnnnnnnnnnnnnnnnnnnnnnnnnnnnnnnnnnnnnnnnnnnnnnnnnnnnnnnnnnnnnnnnnnnnnnnnnnnnnnnnnnnnnnnnnnnnnnnnnnnnnnnnnnnnnnnnnnnnnnnnnnnnnnnnnnnnnnnnnnnnnnnnnnnnnnnnnnnnnnnnnnnnnnnnnnnnnnnnnnnnnnnnnnnnnnnnnnnnnnnnnnnnnnnnnnnnnnnnnnnnnnnnnnnnnnnnnnnnnnnnnnnnnnnnnnnnnnnnnnnnnnnnnnnnnnnnnnnnnnnnnnnnnnnnnnnnnnnnnnnnnnnnnnnnnnnnnnnnnnnnnnnnnnnnnnnnnnnnnnnnnnnnnnnnnnnnnnnnnnnnnnnnnnnnnnnnnnnnnnnnnnnnnnnnnnnnnnnnnnnnnnnnnnnnnnnnnnnnnnnnnnnnnnnnnnnnnnnnnnnnnnnnnnnnnnnnnnnnnnnnnnnnnnnnnnnnnnnnnnnnnnnnnnnnnnnnnnnnnnnnnnnnnnnnnnnnnnnnnnnnnnnnnnnnnnnnnnnnnnnnnnnnnnnnnnnnnnnnnnnnnnnnnnnnnnnnnnnnnnnnnnnnnnnnnnnnnnnnnnnnnnnnnnnnnnnnnnnnnnnnnnnnnnnnnnnnnnnnnnnnnnnnnnnnnnnnnnnnnnnnnnnnnnnnnnnnnnnnnnnnnnnnnnnnnnnnnnnnnnnnnnnnnnnnnnnnnnnnnnnnnnnnnnnnnnnnnnnnnnnnnnnnnnnnnnnnnnnnnnnnnnnnnnnnnnnnnnnnnnnnnnnnnnnnnnnnnnnnnnnnnnnnnnnnnnnnnnnnnnnnnnnnnnnnnnnnnnnnnnnnnnnnnnnnnnnnnnnnnnnnnnnnnnnnnnnnnnnnnnnnnnnnnnnnnnnnnnnnnnnnnnnnnnnnnnnnnnnnnnnnnnnnnnnnnnnnnnnnnnnnnnnnnnnnnnnnnnnnnnnnnnnnnnnnnnnnnnnnnnnnnnnnnnnnnnnnnnnnnnnnnnnnnnnnnnnnnnnnnnnnnnnnnnnnnnnnnnnnnnnnnnnnnnnnnnnnnnnnnnnnnnnnnnnnnnnnnnnnnnnnnnnnnnnnnnnnnnnnnnnnnnnnnnnnnnnnnnnnnnnnnnnnnnnnnnnnnnnnnnnnnnnnnnnnnnnnnnnnnnnnnnnnnnnnnnnnnnnnnnnnnnnnnnnnnnnnnnnnnnnnnnnnnnnnnnnnnnnnnnnnnnnnnnnnnnnnnnnnnnnnnnnnnnnnnnnnnnnnnnnnnnnnnnnnnnnnnnnnnnnnnnnnnnnnnnnnnnnnnnnnnnnnnnnnnnnnnnnnnnnnnnnnnnnnnnnnnnnnnnnnnnnnnnnnnnnnnnnnnnnnnnnnnnnnnnnnnnnnnnnnnnnnnnnnnnnnnnnnnnnnnnnnnnnnnnnnnnnnnnnnnnnnnnnnnnnnnnnnnnnnnnnnnnnnnnnnnnnnnnnnnnnnnnnnnnnnnnnnnnnnnnnnnnnnnnnnnnnnnnnnnnnnnnnnnnnnnnnnnnnnnnnnnnnnnnnnnnnnnnnnnnnnnnnnnnnnnnnnnnnnnnnnnnnnnnnnnnnnnnnnnnnnnnnnnnnnnnnnnnnnnnnnnnnnnnnnnnnnnnnnnnnnnnnnnnnnnnnnnnnnnnnnnnnnnnnnnnnnnnnnnnnnnnnnnnnnnnnnnnnnnnnnnnnnnnnnnnnnnnnnnnnnnnnnnnnnnnnnnnnnnnnnnnnnnnnnnnnnnnnnnnnnnnnnnnnnnnnnnnnnnnnnnnnnnnnnnnnnnnnnnnnnnnnnnnnnnnnnnnnnnnnnnnnnnnnnnnnnnnnnnnnnnnnnnnnnnnnnnnnnnnnnnnnnnnnnnnnnnnnnnnnnnnnnnnnnnnnnnnnnnnnnnnnnnnnnnnnnnnnnnnnnnnnnnnnnnnnnnnnnnnnnnnnnnnnnnnnnnnnnnnnnnnnnnnnnnnnnnnnnnnnnnnnnnnnnnnnnnnnnnnnnnnnnnnnnnnnnnnnnnnnnnnnnnnnnnnnnnnnnnnnnnnnnnnnnnnnnnnnnnnnnnnnnnnnnnnnnnnnnnnnnnnnnnnnnnnnnnnnnnnnnnnnnnnnnnnnnnnnnnnnnnnnnnnnnnnnnnnnnnnnnnnnnnnnnnnnnnnnnnnnnnnnnnnnnnnnnnnnnnnnnnnnnnnnnnnnnnnnnnnnnnnnnnnnnnnnnnnnnnnnnnnnnnnnnnnnnnnnnnnnnnnnnnnnnnnnnnnnnnnnnnnnnnnnnnnnnnnnnnnnnnnnnnnnnnnnnnnnnnnnnnnnnnnnnnnnnnnnnnnnnnnnnnnnnnnnnnnnnnnnnnnnnnnnnnnnnnnnnnnnnnnnnnnnnnnnnnnnnnnnnnnnnnnnnnnnnnnnnnnnnnnnnnnnnnnnnnnnnnnnnnnnnnnnnnnnnnnnnnnnnnnnnnnnnnnnnnnnnnnnnnnnnnnnnnnnnnnnnnnnnnnnnnnnnnnnnnnnnnnnnnnnnnnnnnnnnnnnnnnnnnnnnnnnnnnnnnnnnnnnnnnnnnnnnnnnnnnnnnnnnnnnnnnnnnnnnnnnnnnnnnnnnnnnnnnnnnnnnnnnnnnnnnnnnnnnnnnnnnnnnnnnnnnnnnnnnnnnnnnnnnnnnnnnnnnnnnnnnnnnnnnnnnnnnnnnnnnnnnnnnnnnnnnnnnnnnnnnnnnnnnnnnnnnnnnnnnnnnnnnnnnnnnnnnnnnnnnnnnnnnnnnnnnnnnnnnnnnnnnnnnnnnnnnnnnnnnnnnnnnnnnnnnnnnnnnnnnnnnnnnnnnnnnnnnnnnnnnnnnnnnnnnnnnnnnnnnnnnnnnnnnnnnnnnnnnnnnnnnnnnnnnnnnnnnnnnnnnnnnnnnnnnnnnnnnnnnnnnnnnnnnnnnnnnnnnnnnnnnnnnnnnnnnnnnnnnnnnnnnnnnnnnnnnnnnnnnnnnnnnnnnnnnnnnnnnnnnnnnnnnnnnnnnnnnnnnnnnnnnnnnnnnnnnnnnnnnnnnnnnnnnnnnnnnnnnnnnnnnnnnnnnnnnnnnnnnnnnnnnnnnnnnnnnnnnnnnnnnnnnnnnnnnnnnnnnnnnnnnnnnnnnnnnnnnnnnnnnnnnnnnnnnnnnnnnnnnnnnnnnnnnnnnnnnnnnnnnnnnnnnnnnnnnnnnnnnnnnnnnnnnnnnnnnnnnnnnnnnnnnnnnnnnnnnnnnnnnnnnnnnnnnnnnnnnnnnnnnnnnnnnnnnnnnnnnnnnnnnnnnnnnnnnnnnnnnnnnnnnnnnnnnnnnnnnnnnnnnnnnnnnnnnnnnnnnnnnnnnnnnnnnnnnnnnnnnnnnnnnnnnnnnnnnnnnnnnnnnnnnnnnnnnnnnnnnnnnnnnnnnnnnnnnnnnnnnnnnnnnnnnnnnnnnnnnnnnnnnnnnnnnnnnnnnnnnnnnnnnnnnnnnnnnnnnnnnnnnnnnnnnnnnnnnnnnnnnnnnnnnnnnnnnnnnnnnnnnnnnnnnnnnnnnnnnnnnnnnnnnnnnnnnnnnnnnnnnnnnnnnnnnnnnnnnnnnnnnnnnnnnnnnnnnnnnnnnnnnnnnnnnnnnnnnnnnnnnnnnnnnnnnnnnnnnnnnnnnnnnnnnnnnnnnnnnnnnnnnnnnnnnnnnnnnnnnnnnnnnnnnnnnnnnnnnnnnnnnnnnnnnnnnnnnnnnnnnnnnnnnnnnnnnnnnnnnnnnnnnnnnnnnnnnnnnnnnnnnnnnnnnnnnnnnnnnnnnnnnnnnnnnnnnnnnnnnnnnnnnnnnnnnnnnnnnnnnnnnnnnnnnnnnnnnnnnnnnnnnnnnnnnnnnnnnnnnnnnnnnnnnnnnnnnnnnnnnnnnnnnnnnnnnnnnnnnnnnnnnnnnnnnnnnnnnnnnnnnnnnnnnnnnnnnnnnnnnnnnnnnnnnnnnnnnnnnnnnnnnnnnnnnnnnnnnnnnnnnnnnnnnnnnnnnnnnnnnnnnnnnnnnnnnnnnnnnnnnnnnnnnncgctacgggcagcaaatgcgcgtagcggtcgagccgctccgcccgctccaggacataaccgaggcgtttgaggatcgagcggttgcccatgcggtcggcgcacgaaaccaccttcgccacatcaatctggtcgtggtcgaagtacagcgcccgcgccaccggctcgatcccgccgcagtgctccgggcggtcaaggcagtccgctatcgtcttctccgggtcggacaccagcaccgcatggttgtcgatctccacctcccgccacccgaagaacttgcgcggcgagagccgcacgaagcgacactcctgcgagagcaccgtcaccggatgccgggcgcgggtcgtcgctatgaacgtggtcagcgggatctgctcggtcagcccgtggtagttcagagccgaccagaagccgatgtagtagggttcggcgagcaacgaggccgtgacgaagctgtgcaaggtaaagacatccgcgccgctcacgccgacgtccagcgggacgagcgcgtagaggccccgctttaggggtagcacccagcgcttgcgcgccaggcgatacagcacctgttgcgcgtccccaccgagcaagcgcgccgcgtcagcggtagcgaagatcggcttgcgctcctgcgccagagcccgcaccaggaaagcctcgcggtcgccgagtgataggttataattctgtgcggtatatctcatgtcagccaactttcagcacaagcataatacccggagatgtcatctgtcaagtgcagtaactggacaagcattgagaccgggtagcgcccgctacctcagtcaccgctggcaccattacccggcatttccgccacctgttggcgcaagtcgtcggcgtccatgtgcgtgtagcgctgggtggtggtgacgctggagtggcccaggagttcctggacggcgcggaggttgggccgcgcgcgcagggcatgggtggcgaaggtgtggcgtagcagatgcggccccgagcggtcggtgatgccgatgcgccgcagatagcggttgaccagcagggccaccccccgcaccgagaagcgctcgccgctgcggttgaggaacagagcgggattgtcgtcctgacgttgggcgaggtaatcttccagcgtgcggcgggcatgggcgttgatgggcacccagcgcaggcgccgccccttgcccactagttgcacctggccccagccatccgcgggcaattggacatccgcgcggttgagcgcacacagctctccaacccgcaggccggtgttgtagaggaaggccagcagcgccaggtcgcggacgccggtgggcgtctccaggcacggctcggccagcaaccgatctacctcttccaccgtcaggtgcttgggcgcgagggttggccccacgcggatggagcgcaggctcatggcggggctggcgtccaccacgcggttgtccaggaggaagttgaagaacgagcgggtggcggcgatggcgtggttgatggtggagggcgcgcgcccggcctgttgttggtctcggaagaactcgcgcaagtcggcggggtgaacctggtcgaggcgcgccggcagcgccgccaggaggggctccagatcccgccggtacgacttcactgaatgcggcgagcgcccctccagcgccagcgcatccaggaactcgctcagcagagaccgagtctggcgcttgccccctcccttgcccctacctgccttccctgatcctcccttggtcatcctggcctcctcgcacgcgagctgaacatcgcataagtgattagggcggatgttcacgtttccgtcaaggccaaggggagcggatatgactcgtctgggcgacgaagtggcgcacagacgcgccgacagcgccgcgaagggccggaaggcgaggcatagccgcaggccggggccgaaagccccacacaggcgcccacggcgcgccgttcgcggcctgtcacgcagctagctgaaggatacagcgcaacgatggcgaaatcgcacttctgctgctcatttcgccgagatgcgccggagttgacgcaggcaaagtgccggaggtcaactgtggtcacaagtccggttctgctcttgttctgggggaagaccggccgtacttctcgcagctaccacccattgctgttccacatgctcgatgttgccgccgtggcgggtctcgtttgggaccattgcctgactccgcgacttcgaaggagactcgaactctcgctcggagctgacgcgcgcactcaagccgtgtttctgtccggggcgcacgacatcggcaaggccgaccagcgattcctcgtaatgcccccgagcagacggcaaggcaccgcgccgcggccgctacctgacccgttagcagccaaagatcggcggaggcccttgacaagatccccacccgcacccacctgcttgtaatggctgcgtcggcgtgcgcgcatgacgcaagacaaagtcggccaattggatggagcaagtgcatggactataaccttatcgtgcagccgtggattcccgttctctggagcgatggcgagtacaagcgcgtgggcatcagggatgcattagtgaaggcaagttgtatccgccagatcgcggcgagcaatcccatggatcgcgtggcaattctgcgtttcctgctggcgctgctgtattggtgcaagggcaacccgccagacaaagggagcgccatttcaggcacgccgttccctccggagtggttcgccaaactcgacgacaacagggactgcttcaaccttctgggcgagggaaagcgattctatcaggatcgtgacgcacggagaagccgggcagctacggatctggtccaggagattcccacgggcaacaacttctggcatttccggcactcgatagaccaggaggacggactctgcctcgcctgctgcgccatgggactgttgaggttgccgctgttttccgtaagtggcctgcctgatttgaagtccgggatcaatggcactccgccggtgtatgtcgtgccctggggcaggtcgctgctacagacgctgcaggcaaactgggtgacatacaccaatcttggcgagcccgcatgggttcaccccgaggttcgtctaactcccgctcaggaagtgcccttgctcaccggtttgacgctgctgtccagacgggtatggctgcacgatctcggacagccaggcccatgcgtgggctgcggagcaaagacagtgctcatacggacgtgcgagtttcagtcggccggggcacagaagaacgatcgatggaacgatcctcatgtcgtctattggggcgagacgccacgaaaggcattcaaggcagcggacctgacggcagcgggcaagttcagaatggaccgcccgtggccctatctgcttgctggcgttgggcaagagggcaagttcggactcatggacaagccgatatcgctgctaatcgtcgggtttgccactgaccaagcaaagaacattgacgtgtgggaacgcatccttgccgcgccatcaacagggtcaacccaagaaacggggacatcctcgatgcagcaatggcagagggagggtggacggctggagaggcggatagcgcggatagtgaggtctcaagaccagggcgcggctgccatcgctgccgcccgcccccatgtcgaaggcagagtctccgcgaaggcgggcgagttgattgtcggcacggacgaagcctggaatcgggcggcggcggaataccgcccaatgatggaggccatcgccagatctctttccccaggtttcactacggcggcggtgcaacggcgaagggagatcgccgacgtgttgccggacatgtggcccaggacagaatcggcgaagaaaccaggccgtaagaaaggaggcgagaggtgacggcaacggagcggtacattgaggccctgacatgtctgaagtctggcgaccttggattgctgcgcacgcacgcggggcagggactcgacaagacggtggacgggttcgacctgttcgcgggtctctggtggccgttgagaaaggatagtccgcgtgctccccgccgcgaggtcgcctggctgactgcgaagctctacgccttccgtccgattccgcagtcgcccgatgacacgcttgcccgccagctacgtcggtgccagcccaccaatgacctagcgagaaagcgtttcccgcaaaggttcgacaggatgctcgtcctgcccctcgacaagatcgagcctgcgctacgatgggcgcttggcttaatcgcgtcaacaggtcgagaactcgactgggtaagattgacggacgatctctccatctgggaacgcgaatccatgcgcaccaggtgggcctatgagttcatcgggcacaacgaaaggggacagtcatgctgatcgagattcacgctattcagaaccacagcccgtcgaatctgaacagagacgacctgggcgcgccaaagacctgcttctttggcggcattctgcgctcccgcatctccagccagtgcctcaagcgaagcatccgcatgagcgagcagttcaaggcattgctcggcggcgtccgcactcggcagttggcgaagctgattgcggcggaagtcaccggcaagcccgacgcgcagaagcgtgcggagaagatcctccaggcttgcggattcgagcccaagacgaagaagcagaacgccgaggaagatgatctcggcgattcagacaagagcaagatgcttgtgtacacaacacgccaagcgattcaggagatggcaaagcttcttcagggcagcaaagcgaagaccgatgagcacctagcgcttgagttcgcgagactcatcggcaagcgagtggccgtgccggatatagcgctgtcagggcgtatgctggagcccgacaaggcctccaaggatgtgtggaagggactcgacaccacggtggacgccgcgctgcaagtggcgcacgcgatctcgacgcacgaggcccgcccggaagtggactactatgtggccgcagacgacattcccggcgacgatgcgggagccggctatctggacgaggcaatgttcgcctccgcctgcttctacaagtatttctcgatcaactggggaacgttggtcgagaacctaaagggctatggcgagaaccacgaagagctggccgcccacacggtcggcgcgttccttcgcggtgcggcccttgcgaatcccacgggcaagcagaacagctgcgccgcgcacaatccccccgacggaatgctgattgagatcaagcacactccgatcagctacgccaatgccttcgcgagccccgtgccgagcaagggcgagcgggacatggtctcgcagagcgtcgcgcaactggcgcaatacgtttatgatctggacatcggatacggcaagccgcagaaccggttctggttctcgcccaatctgcggttccggttgagtgttgtcgaggataagcgggagatcgagcttgccgataacaacatcaggtcgctcgacgagctggtccccgccgtcgtcgccgccatcggccatgattggaaagcggtgcagacggtcgttgcgaactcagaggccgtatcatgagttacgacaccctcttcctgcgcctcgaaggtccgtttcaggcgtggggcgatcaggagtcaaagctcgtcatccggcggacggccgaggcgccgacaagatcgggcgtgattgggatgctctgcgcggcattaggcgtttcccgagccaaggccgccgaggagtcgctgccaaggcttggggctttgcgcatgggcgtccgcctcgaccgccccggcacgcggtggtgggactatcacaccgtcggcgccggaatgcagatgcggattgcggaaggcgagggaaagacaaagcccggcgcaatgctgacccgccgagagtacctgtgcgacgcgtcgtttctcgtcgccctgcgcggcgagccgacgctgattgctgaactcgaaacggcgatgggaaatccacaatggacgctctacctcgggaggaaatgctgccccccgtctcgcccactgctggaacatccggcgggcgcgtttccagacttgctctcggcactcacgtcggtgccgtggcggcggcggctcagagaagactgtccaccagaaaccgtggattgcctactcgactgggggccgacgtccgaacagcccgaagcgcccgacgatgcgcttgtctggtacgacgtgccgctcacctttgagccgccggcgcacggcccccgctttgtcatccgacggcaattgcgcgtgggcgcggatggcgaggtccagatcgccgaaaagcccgcgcagagtcctgctccggctccgccgcgcccacgcgcggactaccggaacaccgagtaccgcaatgcccgcgcagcccgcctacacgcggattggggcctttgtgtcttctgcaaagctccagccgcgacggtgcagcatgtcacctatcgccgcgccggcggaggcgagaccggggacgacctgcgctcgctctgccgcctctgccacgacgcggtgacgatgatcgagtacggcctgggcatgggtctggaccgcatcaacccgtgcgaagctcgttggcgcgggcaaatcatcgcgaagcgcgaggagatcatccgctttcgctcccttgagactcgccgtcggcgcctcagcgctgaggaggtggaatagccatgtacctctcttgcctcttgattgacgttggggacaaccctgaccgcccacgccccgggcggctctggctgcgcaacatctaccacgtccaccagcgcctgtgcatggcgtttccgtcggcgcccagaagggccgatgatgcggacttcctagagcctttcgacccgcagcactttggggccggacaggtccacgtcgtccggggatcacacgcgggcttcctgtttcgcattgaccctaagcccggcggtcgggccgtgatcgtcgtgcagtccgcggtcaggccggattgggagtacgccttccgcaacgccggttatcttctggcttgcgcccctcaggcaaagcagttccacccgagcttccaagtcaaccagcgcttgcggtttcgtctcgttgccaatcccaccaagaagatcggcacgctctccaaggatgaacgacaagccaagaaagagggccgcaatgggtcacgggttccggtgcggcccgagcaattgcacgaatggcttgctcggcgagctgcgctcgccgggttcctcgtagagcaggatgccgttagcattcaaccgggctacgtctatgtgaagaagccgaatggagacgggtcacatgatgacgggaagaagccgaacagcggccgccgtcgctcggtccgctatgaagggacacttacggtgaccgacccggcgaccttcaagaacgcccttgtccgcggcatcggtcccgccaaggccttcggcttcggcctgctatccgtggcgccggtgtcgtagaacaccgatccagcgcctgcaccttgacaactgaatacaggctacatgccccgcaagcagccgggaagtgcggaacaatacagacaggcgcaccatgaacgacgggagggggccgtggacgacctgcatcgcttgcccaagttccgagactgcctgtcttacctgtacctggagcatggccgcatagaccagcacgagaagaccatcgccttccatgacgcccaagggaaggtgccggtgccgattgcctcgctcgccgtgctcatgctcggcccgggcaccgccgtcacccatgccgccatccgcgcgctcgcggacaacaactgcctcgtcgtgtggtgcggcgaggagaacgtccgcttctacgcctccggcatgggtggcacccgcagctccgcggccctgctccatcaggcacggctcgcaaccgacgacaagctgcgtctccaggtcgtcgcgcgcatgtaccgaatgcgtttccaagaggacctgccgcccgataccaccatcgagcagcttcgcggcatcgagggttcgcgtgtcagggccgcctacgcccgcctgagccgcgaaaccagcatcgcctggtcaggccgcaactatgaccgcagcaactggggggcgggcgacaccgtcaatcgcgcactgtcggcggccaactcgtgtctctacgggctgtgccacgccgcgatcctctccgtcggcctcagcccggcgctcggcttcattcacaccggcaagcaactgtccttcgtttacgacatcgccgacctctacaaggtcgccttcaccattccggtggccttccaaaccaccgccgcatccgaagccgacatcgagcggcgagtgcggcttgcctgtcgcgatgccttccgcgaggggcggctgctccagcatattgtgcccgacatccgtgaggcccttggcgcaacggatgaaggcgatgcgctggccgacatctgggcgcaggacccggccatgccggccgagtggtgggcgccgcctcatggaaccgtcatcacgcgtccgcccgccgctgatgacacctcacaggagacctcaacatggtcgtcttgattgtcgagaactcgccgccgagcctgcgcggcgagatcacgcggtggatgatcgagccccgcgcaggggtcttcgtcggcaccatgtccgcgatggtgcgagacaagctttgggagcgtgtcgcccgctcaggcatagacggcggcgcaaccatgcttcacagcgccaataccgagcaggggttcgccgtgcgcagcttcggtaacacgtcgcgccagatcgttgaactcgacgggctgatcctcgtgcagcgcgatgacccgccgagcgccaagaagcgttgaaacgcatccggcggcgaacggctgtttctgttgtccccacgcacgtgggggtgaaccgcaggtgatcgtgcctttgtctccgctggcactgttgtccccacgcacgtgggggtgaaccgctcgaggagttactgcgcatcgcagagatcacgttgtccccacgcacgtgggggtgaaccgaccaggcgtccgccgccctgcgccaggtgcaagttgtccccacgcacgtgggggtgaaccggttggccggatggtgagcggatcgtagccggtgttgtccccacgcacgtgggggtgaaccgacatcggctaccaccgcgtgatcttccgcgacgttgtccccacgcacgtgggggtgaaccgtaatccgtcagacgcgagaactggcacggcccgttgtccccccgcacggtggggtgaaccgg

SEQ ID NO: 1069 - DNA, 103336 bp, Artificial Sequence
  Synthetic Oligonucleotide
  misc_feature (1)..(94185): n is a, c, g, or t
nnnnnnnnnnnnnnnnnnnnnnnnnnnnnnnnnnnnnnnnnnnnnnnnnnnnnnnnnnnnnnnnnnnnnnnnnnnnnnnnnnnnnnnnnnnnnnnnnnnnnnnnnnnnnnnnnnnnnnnnnnnnnnnnnnnnnnnnnnnnnnnnnnnnnnnnnnnnnnnnnnnnnnnnnnnnnnnnnnnnnnnnnnnnnnnnnnnnnnnnnnnnnnnnnnnnnnnnnnnnnnnnnnnnnnnnnnnnnnnnnnnnnnnnnnnnnnnnnnnnnnnnnnnnnnnnnnnnnnnnnnnnnnnnnnnnnnnnnnnnnnnnnnnnnnnnnnnnnnnnnnnnnnnnnnnnnnnnnnnnnnnnnnnnnnnnnnnnnnnnnnnnnnnnnnnnnnnnnnnnnnnnnnnnnnnnnnnnnnnnnnnnnnnnnnnnnnnnnnnnnnnnnnnnnnnnnnnnnnnnnnnnnnnnnnnnnnnnnnnnnnnnnnnnnnnnnnnnnnnnnnnnnnnnnnnnnnnnnnnnnnnnnnnnnnnnnnnnnnnnnnnnnnnnnnnnnnnnnnnnnnnnnnnnnnnnnnnnnnnnnnnnnnnnnnnnnnnnnnnnnnnnnnnnnnnnnnnnnnnnnnnnnnnnnnnnnnnnnnnnnnnnnnnnnnnnnnnnnnnnnnnnnnnnnnnnnnnnnnnnnnnnnnnnnnnnnnnnnnnnnnnnnnnnnnnnnnnnnnnnnnnnnnnnnnnnnnnnnnnnnnnnnnnnnnnnnnnnnnnnnnnnnnnnnnnnnnnnnnnnnnnnnnnnnnnnnnnnnnnnnnnnnnnnnnnnnnnnnnnnnnnnnnnnnnnnnnnnnnnnnnnnnnnnnnnnnnnnnnnnnnnnnnnnnnnnnnnnnnnnnnnnnnnnnnnnnnnnnnnnnnnnnnnnnnnnnnnnnnnnnnnnnnnnnnnnnnnnnnnnnnnnnnnnnnnnnnnnnnnnnnnnnnnnnnnnnnnnnnnnnnnnnnnnnnnnnnnnnnnnnnnnnnnnnnnnnnnnnnnnnnnnnnnnnnnnnnnnnnnnnnnnnnnnnnnnnnnnnnnnnnnnnnnnnnnnnnnnnnnnnnnnnnnnnnnnnnnnnnnnnnnnnnnnnnnnnnnnnnnnnnnnnnnnnnnnnnnnnnnnnnnnnnnnnnnnnnnnnnnnnnnnnnnnnnnnnnnnnnnnnnnnnnnnnnnnnnnnnnnnnnnnnnnnnnnnnnnnnnnnnnnnnnnnnnnnnnnnnnnnnnnnnnnnnnnnnnnnnnnnnnnnnnnnnnnnnnnnnnnnnnnnnnnnnnnnnnnnnnnnnnnnnnnnnnnnnnnnnnnnnnnnnnnnnnnnnnnnnnnnnnnnnnnnnnnnnnnnnnnnnnnnnnnnnnnnnnnnnnnnnnnnnnnnnnnnnnnnnnnnnnnnnnnnnnnnnnnnnnnnnnnnnnnnnnnnnnnnnnnnnnnnnnnnnnnnnnnnnnnnnnnnnnnnnnnnnnnnnnnnnnnnnnnnnnnnnnnnnnnnnnnnnnnnnnnnnnnnnnnnnnnnnnnnnnnnnnnnnnnnnnnnnnnnnnnnnnnnnnnnnnnnnnnnnnnnnnnnnnnnnnnnnnnnnnnnnnnnnnnnnnnnnnnnnnnnnnnnnnnnnnnnnnnnnnnnnnnnnnnnnnnnnnnnnnnnnnnnnnnnnnnnnnnnnnnnnnnnnnnnnnnnnnnnnnnnnnnnnnnnnnnnnnnnnnnnnnnnnnnnnnnnnnnnnnnnnnnnnnnnnnnnnnnnnnnnnnnnnnnnnnnnnnnnnnnnnnnnnnnnnnnnnnnnnnnnnnnnnnnnnnnnnnnnnnnnnnnnnnnnnnnnnnnnnnnnnnnnnnnnnnnnnnnnnnnnnnnnnnnnnnnnnnnnnnnnnnnnnnnnnnnnnnnnnnnnnnnnnnnnnnnnnnnnnnnnnnnnnnnnnnnnnnnnnnnnnnnnnnnnnnnnnnnnnnnnnnnnnnnnnnnnnnnnnnnnnnnnnnnnnnnnnnnnnnnnnnnnnnnnnnnnnnnnnnnnnnnnnnnnnnnnnnnnnnnnnnnnnnnnnnnnnnnnnnnnnnnnnnnnnnnnnnnnnnnnnnnnnnnnnnnnnnnnnnnnnnnnnnnnnnnnnnnnnnnnnnnnnnnnnnnnnnnnnnnnnnnnnnnnnnnnnnnnnnnnnnnnnnnnnnnnnnnnnnnnnnnnnnnnnnnnnnnnnnnnnnnnnnnnnnnnnnnnnnnnnnnnnnnnnnnnnnnnnnnnnnnnnnnnnnnnnnnnnnnnnnnnnnnnnnnnnnnnnnnnnnnnnnnnnnnnnnnnnnnnnnnnnnnnnnnnnnnnnnnnnnnnnnnnnnnnnnnnnnnnnnnnnnnnnnnnnnnnnnnnnnnnnnnnnnnnnnnnnnnnnnnnnnnnnnnnnnnnnnnnnnnnnnnnnnnnnnnnnnnnnnnnnnnnnnnnnnnnnnnnnnnnnnnnnnnnnnnnnnnnnnnnnnnnnnnnnnnnnnnnnnnnnnnnnnnnnnnnnnnnnnnnnnnnnnnnnnnnnnnnnnnnnnnnnnnnnnnnnnnnnnnnnnnnnnnnnnnnnnnnnnnnnnnnnnnnnnnnnnnnnnnnnnnnnnnnnnnnnnnnnnnnnnnnnnnnnnnnnnnnnnnnnnnnnnnnnnnnnnnnnnnnnnnnnnnnnnnnnnnnnnnnnnnnnnnnnnnnnnnnnnnnnnnnnnnnnnnnnnnnnnnnnnnnnnnnnnnnnnnnnnnnnnnnnnnnnnnnnnnnnnnnnnnnnnnnnnnnnnnnnnnnnnnnnnnnnnnnnnnnnnnnnnnnnnnnnnnnnnnnnnnnnnnnnnnnnnnnnnnnnnnnnnnnnnnnnnnnnnnnnnnnnnnnnnnnnnnnnnnnnnnnnnnnnnnnnnnnnnnnnnnnnnnnnnnnnnnnnnnnnnnnnnnnnnnnnnnnnnnnnnnnnnnnnnnnnnnnnnnnnnnnnnnnnnnnnnnnnnnnnnnnnnnnnnnnnnnnnnnnnnnnnnnnnnnnnnnnnnnnnnnnnnnnnnnnnnnnnnnnnnnnnnnnnnnnnnnnnnnnnnnnnnnnnnnnnnnnnnnnnnnnnnnnnnnnnnnnnnnnnnnnnnnnnnnnnnnnnnnnnnnnnnnnnnnnnnnnnnnnnnnnnnnnnnnnnnnnnnnnnnnnnnnnnnnnnnnnnnnnnnnnnnnnnnnnnnnnnnnnnnnnnnnnnnnnnnnnnnnnnnnnnnnnnnnnnnnnnnnnnnnnnnnnnnnnnnnnnnnnnnnnnnnnnnnnnnnnnnnnnnnnnnnnnnnnnnnnnnnnnnnnnnnnnnnnnnnnnnnnnnnnnnnnnnnnnnnnnnnnnnnnnnnnnnnnnnnnnnnnnnnnnnnnnnnnnnnnnnnnnnnnnnnnnnnnnnnnnnnnnnnnnnnnnnnnnnnnnnnnnnnnnnnnnnnnnnnnnnnnnnnnnnnnnnnnnnnnnnnnnnnnnnnnnnnnnnnnnnnnnnnnnnnnnnnnnnnnnnnnnnnnnnnnnnnnnnnnnnnnnnnnnnnnnnnnnnnnnnnnnnnnnnnnnnnnnnnnnnnnnnnnnnnnnnnnnnnnnnnnnnnnnnnnnnnnnnnnnnnnnnnnnnnnnnnnnnnnnnnnnnnnnnnnnnnnnnnnnnnnnnnnnnnnnnnnnnnnnnnnnnnnnnnnnnnnnnnnnnnnnnnnnnnnnnnnnnnnnnnnnnnnnnnnnnnnnnnnnnnnnnnnnnnnnnnnnnnnnnnnnnnnnnnnnnnnnnnnnnnnnnnnnnnnnnnnnnnnnnnnnnnnnnnnnnnnnnnnnnnnnnnnnnnnnnnnnnnnnnnnnnnnnnnnnnnnnnnnnnnnnnnnnnnnnnnnnnnnnnnnnnnnnnnnnnnnnnnnnnnnnnnnnnnnnnnnnnnnnnnnnnnnnnnnnnnnnnnnnnnnnnnnnnnnnnnnnnnnnnnnnnnnnnnnnnnnnnnnnnnnnnnnnnnnnnnnnnnnnnnnnnnnnnnnnnnnnnnnnnnnnnnnnnnnnnnnnnnnnnnnnnnnnnnnnnnnnnnnnnnnnnnnnnnnnnnnnnnnnnnnnnnnnnnnnnnnnnnnnnnnnnnnnnnnnnnnnnnnnnnnnnnnnnnnnnnnnnnnnnnnnnnnnnnnnnnnnnnnnnnnnnnnnnnnnnnnnnnnnnnnnnnnnnnnnnnnnnnnnnnnnnnnnnnnnnnnnnnnnnnnnnnnnnnnnnnnnnnnnnnnnnnnnnnnnnnnnnnnnnnnnnnnnnnnnnnnnnnnnnnnnnnnnnnnnnnnnnnnnnnnnnnnnnnnnnnnnnnnnnnnnnnnnnnnnnnnnnnnnnnnnnnnnnnnnnnnnnnnnnnnnnnnnnnnnnnnnnnnnnnnnnnnnnnnnnnnnnnnnnnnnnnnnnnnnnnnnnnnnnnnnnnnnnnnnnnnnnnnnnnnnnnnnnnnnnnnnnnnnnnnnnnnnnnnnnnnnnnnnnnnnnnnnnnnnnnnnnnnnnnnnnnnnnnnnnnnnnnnnnnnnnnnnnnnnnnnnnnnnnnnnnnnnnnnnnnnnnnnnnnnnnnnnnnnnnnnnnnnnnnnnnnnnnnnnnnnnnnnnnnnnnnnnnnnnnnnnnnnnnnnnnnnnnnnnnnnnnnnnnnnnnnnnnnnnnnnnnnnnnnnnnnnnnnnnnnnnnnnnnnnnnnnnnnnnnnnnnnnnnnnnnnnnnnnnnnnnnnnnnnnnnnnnnnnnnnnnnnnnnnnnnnnnnnnnnnnnnnnnnnnnnnnnnnnnnnnnnnnnnnnnnnnnnnnnnnnnnnnnnnnnnnnnnnnnnnnnnnnnnnnnnnnnnnnnnnnnnnnnnnnnnnnnnnnnnnnnnnnnnnnnnnnnnnnnnnnnnnnnnnnnnnnnnnnnnnnnnnnnnnnnnnnnnnnnnnnnnnnnnnnnnnnnnnnnnnnnnnnnnnnnnnnnnnnnnnnnnnnnnnnnnnnnnnnnnnnnnnnnnnnnnnnnnnnnnnnnnnnnnnnnnnnnnnnnnnnnnnnnnnnnnnnnnnnnnnnnnnnnnnnnnnnnnnnnnnnnnnnnnnnnnnnnnnnnnnnnnnnnnnnnnnnnnnnnnnnnnnnnnnnnnnnnnnnnnnnnnnnnnnnnnnnnnnnnnnnnnnnnnnnnnnnnnnnnnnnnnnnnnnnnnnnnnnnnnnnnnnnnnnnnnnnnnnnnnnnnnnnnnnnnnnnnnnnnnnnnnnnnnnnnnnnnnnnnnnnnnnnnnnnnnnnnnnnnnnnnnnnnnnnnnnnnnnnnnnnnnnnnnnnnnnnnnnnnnnnnnnnnnnnnnnnnnnnnnnnnnnnnnnnnnnnnnnnnnnnnnnnnnnnnnnnnnnnnnnnnnnnnnnnnnnnnnnnnnnnnnnnnnnnnnnnnnnnnnnnnnnnnnnnnnnnnnnnnnnnnnnnnnnnnnnnnnnnnnnnnnnnnnnnnnnnnnnnnnnnnnnnnnnnnnnnnnnnnnnnnnnnnnnnnnnnnnnnnnnnnnnnnnnnnnnnnnnnnnnnnnnnnnnnnnnnnnnnnnnnnnnnnnnnnnnnnnnnnnnnnnnnnnnnnnnnnnnnnnnnnnnnnnnnnnnnnnnnnnnnnnnnnnnnnnnnnnnnnnnnnnnnnnnnnnnnnnnnnnnnnnnnnnnnnnnnnnnnnnnnnnnnnnnnnnnnnnnnnnnnnnnnnnnnnnnnnnnnnnnnnnnnnnnnnnnnnnnnnnnnnnnnnnnnnnnnnnnnnnnnnnnnnnnnnnnnnnnnnnnnnnnnnnnnnnnnnnnnnnnnnnnnnnnnnnnnnnnnnnnnnnnnnnnnnnnnnnnnnnnnnnnnnnnnnnnnnnnnnnnnnnnnnnnnnnnnnnnnnnnnnnnnnnnnnnnnnnnnnnnnnnnnnnnnnnnnnnnnnnnnnnnnnnnnnnnnnnnnnnnnnnnnnnnnnnnnnnnnnnnnnnnnnnnnnnnnnnnnnnnnnnnnnnnnnnnnnnnnnnnnnnnnnnnnnnnnnnnnnnnnnnnnnnnnnnnnnnnnnnnnnnnnnnnnnnnnnnnnnnnnnnnnnnnnnnnnnnnnnnnnnnnnnnnnnnnnnnnnnnnnnnnnnnnnnnnnnnnnnnnnnnnnnnnnnnnnnnnnnnnnnnnnnnnnnnnnnnnnnnnnnnnnnnnnnnnnnnnnnnnnnnnnnnnnnnnnnnnnnnnnnnnnnnnnnnnnnnnnnnnnnnnnnnnnnnnnnnnnnnnnnnnnnnnnnnnnnnnnnnnnnnnnnnnnnnnnnnnnnnnnnnnnnnnnnnnnnnnnnnnnnnnnnnnnnnnnnnnnnnnnnnnnnnnnnnnnnnnnnnnnnnnnnnnnnnnnnnnnnnnnnnnnnnnnnnnnnnnnnnnnnnnnnnnnnnnnnnnnnnnnnnnnnnnnnnnnnnnnnnnnnnnnnnnnnnnnnnnnnnnnnnnnnnnnnnnnnnnnnnnnnnnnnnnnnnnnnnnnnnnnnnnnnnnnnnnnnnnnnnnnnnnnnnnnnnnnnnnnnnnnnnnnnnnnnnnnnnnnnnnnnnnnnnnnnnnnnnnnnnnnnnnnnnnnnnnnnnnnnnnnnnnnnnnnnnnnnnnnnnnnnnnnnnnnnnnnnnnnnnnnnnnnnnnnnnnnnnnnnnnnnnnnnnnnnnnnnnnnnnnnnnnnnnnnnnnnnnnnnnnnnnnnnnnnnnnnnnnnnnnnnnnnnnnnnnnnnnnnnnnnnnnnnnnnnnnnnnnnnnnnnnnnnnnnnnnnnnnnnnnnnnnnnnnnnnnnnnnnnnnnnnnnnnnnnnnnnnnnnnnnnnnnnnnnnnnnnnnnnnnnnnnnnnnnnnnnnnnnnnnnnnnnnnnnnnnnnnnnnnnnnnnnnnnnnnnnnnnnnnnnnnnnnnnnnnnnnnnnnnnnnnnnnnnnnnnnnnnnnnnnnnnnnnnnnnnnnnnnnnnnnnnnnnnnnnnnnnnnnnnnnnnnnnnnnnnnnnnnnnnnnnnnnnnnnnnnnnnnnnnnnnnnnnnnnnnnnnnnnnnnnnnnnnnnnnnnnnnnnnnnnnnnnnnnnnnnnnnnnnnnnnnnnnnnnnnnnnnnnnnnnnnnnnnnnnnnnnnnnnnnnnnnnnnnnnnnnnnnnnnnnnnnnnnnnnnnnnnnnnnnnnnnnnnnnnnnnnnnnnnnnnnnnnnnnnnnnnnnnnnnnnnnnnnnnnnnnnnnnnnnnnnnnnnnnnnnnnnnnnnnnnnnnnnnnnnnnnnnnnnnnnnnnnnnnnnnnnnnnnnnnnnnnnnnnnnnnnnnnnnnnnnnnnnnnnnnnnnnnnnnnnnnnnnnnnnnnnnnnnnnnnnnnnnnnnnnnnnnnnnnnnnnnnnnnnnnnnnnnnnnnnnnnnnnnnnnnnnnnnnnnnnnnnnnnnnnnnnnnnnnnnnnnnnnnnnnnnnnnnnnnnnnnnnnnnnnnnnnnnnnnnnnnnnnnnnnnnnnnnnnnnnnnnnnnnnnnnnnnnnnnnnnnnnnnnnnnnnnnnnnnnnnnnnnnnnnnnnnnnnnnnnnnnnnnnnnnnnnnnnnnnnnnnnnnnnnnnnnnnnnnnnnnnnnnnnnnnnnnnnnnnnnnnnnnnnnnnnnnnnnnnnnnnnnnnnnnnnnnnnnnnnnnnnnnnnnnnnnnnnnnnnnnnnnnnnnnnnnnnnnnnnnnnnnnnnnnnnnnnnnnnnnnnnnnnnnnnnnnnnnnnnnnnnnnnnnnnnnnnnnnnnnnnnnnnnnnnnnnnnnnnnnnnnnnnnnnnnnnnnnnnnnnnnnnnnnnnnnnnnnnnnnnnnnnnnnnnnnnnnnnnnnnnnnnnnnnnnnnnnnnnnnnnnnnnnnnnnnnnnnnnnnnnnnnnnnnnnnnnnnnnnnnnnnnnnnnnnnnnnnnnnnnnnnnnnnnnnnnnnnnnnnnnnnnnnnnnnnnnnnnnnnnnnnnnnnnnnnnnnnnnnnnnnnnnnnnnnnnnnnnnnnnnnnnnnnnnnnnnnnnnnnnnnnnnnnnnnnnnnnnnnnnnnnnnnnnnnnnnnnnnnnnnnnnnnnnnnnnnnnnnnnnnnnnnnnnnnnnnnnnnnnnnnnnnnnnnnnnnnnnnnnnnnnnnnnnnnnnnnnnnnnnnnnnnnnnnnnnnnnnnnnnnnnnnnnnnnnnnnnnnnnnnnnnnnnnnnnnnnnnnnnnnnnnnnnnnnnnnnnnnnnnnnnnnnnnnnnnnnnnnnnnnnnnnnnnnnnnnnnnnnnnnnnnnnnnnnnnnnnnnnnnnnnnnnnnnnnnnnnnnnnnnnnnnnnnnnnnnnnnnnnnnnnnnnnnnnnnnnnnnnnnnnnnnnnnnnnnnnnnnnnnnnnnnnnnnnnnnnnnnnnnnnnnnnnnnnnnnnnnnnnnnnnnnnnnnnnnnnnnnnnnnnnnnnnnnnnnnnnnnnnnnnnnnnnnnnnnnnnnnnnnnnnnnnnnnnnnnnnnnnnnnnnnnnnnnnnnnnnnnnnnnnnnnnnnnnnnnnnnnnnnnnnnnnnnnnnnnnnnnnnnnnnnnnnnnnnnnnnnnnnnnnnnnnnnnnnnnnnnnnnnnnnnnnnnnnnnnnnnnnnnnnnnnnnnnnnnnnnnnnnnnnnnnnnnnnnnnnnnnnnnnnnnnnnnnnnnnnnnnnnnnnnnnnnnnnnnnnnnnnnnnnnnnnnnnnnnnnnnnnnnnnnnnnnnnnnnnnnnnnnnnnnnnnnnnnnnnnnnnnnnnnnnnnnnnnnnnnnnnnnnnnnnnnnnnnnnnnnnnnnnnnnnnnnnnnnnnnnnnnnnnnnnnnnnnnnnnnnnnnnnnnnnnnnnnnnnnnnnnnnnnnnnnnnnnnnnnnnnnnnnnnnnnnnnnnnnnnnnnnnnnnnnnnnnnnnnnnnnnnnnnnnnnnnnnnnnnnnnnnnnnnnnnnnnnnnnnnnnnnnnnnnnnnnnnnnnnnnnnnnnnnnnnnnnnnnnnnnnnnnnnnnnnnnnnnnnnnnnnnnnnnnnnnnnnnnnnnnnnnnnnnnnnnnnnnnnnnnnnnnnnnnnnnnnnnnnnnnnnnnnnnnnnnnnnnnnnnnnnnnnnnnnnnnnnnnnnnnnnnnnnnnnnnnnnnnnnnnnnnnnnnnnnnnnnnnnnnnnnnnnnnnnnnnnnnnnnnnnnnnnnnnnnnnnnnnnnnnnnnnnnnnnnnnnnnnnnnnnnnnnnnnnnnnnnnnnnnnnnnnnnnnnnnnnnnnnnnnnnnnnnnnnnnnnnnnnnnnnnnnnnnnnnnnnnnnnnnnnnnnnnnnnnnnnnnnnnnnnnnnnnnnnnnnnnnnnnnnnnnnnnnnnnnnnnnnnnnnnnnnnnnnnnnnnnnnnnnnnnnnnnnnnnnnnnnnnnnnnnnnnnnnnnnnnnnnnnnnnnnnnnnnnnnnnnnnnnnnnnnnnnnnnnnnnnnnnnnnnnnnnnnnnnnnnnnnnnnnnnnnnnnnnnnnnnnnnnnnnnnnnnnnnnnnnnnnnnnnnnnnnnnnnnnnnnnnnnnnnnnnnnnnnnnnnnnnnnnnnnnnnnnnnnnnnnnnnnnnnnnnnnnnnnnnnnnnnnnnnnnnnnnnnnnnnnnnnnnnnnnnnnnnnnnnnnnnnnnnnnnnnnnnnnnnnnnnnnnnnnnnnnnnnnnnnnnnnnnnnnnnnnnnnnnnnnnnnnnnnnnnnnnnnnnnnnnnnnnnnnnnnnnnnnnnnnnnnnnnnnnnnnnnnnnnnnnnnnnnnnnnnnnnnnnnnnnnnnnnnnnnnnnnnnnnnnnnnnnnnnnnnnnnnnnnnnnnnnnnnnnnnnnnnnnnnnnnnnnnnnnnnnnnnnnnnnnnnnnnnnnnnnnnnnnnnnnnnnnnnnnnnnnnnnnnnnnnnnnnnnnnnnnnnnnnnnnnnnnnnnnnnnnnnnnnnnnnnnnnnnnnnnnnnnnnnnnnnnnnnnnnnnnnnnnnnnnnnnnnnnnnnnnnnnnnnnnnnnnnnnnnnnnnnnnnnnnnnnnnnnnnnnnnnnnnnnnnnnnnnnnnnnnnnnnnnnnnnnnnnnnnnnnnnnnnnnnnnnnnnnnnnnnnnnnnnnnnnnnnnnnnnnnnnnnnnnnnnnnnnnnnnnnnnnnnnnnnnnnnnnnnnnnnnnnnnnnnnnnnnnnnnnnnnnnnnnnnnnnnnnnnnnnnnnnnnnnnnnnnnnnnnnnnnnnnnnnnnnnnnnnnnnnnnnnnnnnnnnnnnnnnnnnnnnnnnnnnnnnnnnnnnnnnnnnnnnnnnnnnnnnnnnnnnnnnnnnnnnnnnnnnnnnnnnnnnnnnnnnnnnnnnnnnnnnnnnnnnnnnnnnnnnnnnnnnnnnnnnnnnnnnnnnnnnnnnnnnnnnnnnnnnnnnnnnnnnnnnnnnnnnnnnnnnnnnnnnnnnnnnnnnnnnnnnnnnnnnnnnnnnnnnnnnnnnnnnnnnnnnnnnnnnnnnnnnnnnnnnnnnnnnnnnnnnnnnnnnnnnnnnnnnnnnnnnnnnnnnnnnnnnnnnnnnnnnnnnnnnnnnnnnnnnnnnnnnnnnnnnnnnnnnnnnnnnnnnnnnnnnnnnnnnnnnnnnnnnnnnnnnnnnnnnnnnnnnnnnnnnnnnnnnnnnnnnnnnnnnnnnnnnnnnnnnnnnnnnnnnnnnnnnnnnnnnnnnnnnnnnnnnnnnnnnnnnnnnnnnnnnnnnnnnnnnnnnnnnnnnnnnnnnnnnnnnnnnnnnnnnnnnnnnnnnnnnnnnnnnnnnnnnnnnnnnnnnnnnnnnnnnnnnnnnnnnnnnnnnnnnnnnnnnnnnnnnnnnnnnnnnnnnnnnnnnnnnnnnnnnnnnnnnnnnnnnnnnnnnnnnnnnnnnnnnnnnnnnnnnnnnnnnnnnnnnnnnnnnnnnnnnnnnnnnnnnnnnnnnnnnnnnnnnnnnnnnnnnnnnnnnnnnnnnnnnnnnnnnnnnnnnnnnnnnnnnnnnnnnnnnnnnnnnnnnnnnnnnnnnnnnnnnnnnnnnnnnnnnnnnnnnnnnnnnnnnnnnnnnnnnnnnnnnnnnnnnnnnnnnnnnnnnnnnnnnnnnnnnnnnnnnnnnnnnnnnnnnnnnnnnnnnnnnnnnnnnnnnnnnnnnnnnnnnnnnnnnnnnnnnnnnnnnnnnnnnnnnnnnnnnnnnnnnnnnnnnnnnnnnnnnnnnnnnnnnnnnnnnnnnnnnnnnnnnnnnnnnnnnnnnnnnnnnnnnnnnnnnnnnnnnnnnnnnnnnnnnnnnnnnnnnnnnnnnnnnnnnnnnnnnnnnnnnnnnnnnnnnnnnnnnnnnnnnnnnnnnnnnnnnnnnnnnnnnnnnnnnnnnnnnnnnnnnnnnnnnnnnnnnnnnnnnnnnnnnnnnnnnnnnnnnnnnnnnnnnnnnnnnnnnnnnnnnnnnnnnnnnnnnnnnnnnnnnnnnnnnnnnnnnnnnnnnnnnnnnnnnnnnnnnnnnnnnnnnnnnnnnnnnnnnnnnnnnnnnnnnnnnnnnnnnnnnnnnnnnnnnnnnnnnnnnnnnnnnnnnnnnnnnnnnnnnnnnnnnnnnnnnnnnnnnnnnnnnnnnnnnnnnnnnnnnnnnnnnnnnnnnnnnnnnnnnnnnnnnnnnnnnnnnnnnnnnnnnnnnnnnnnnnnnnnnnnnnnnnnnnnnnnnnnnnnnnnnnnnnnnnnnnnnnnnnnnnnnnnnnnnnnnnnnnnnnnnnnnnnnnnnnnnnnnnnnnnnnnnnnnnnnnnnnnnnnnnnnnnnnnnnnnnnnnnnnnnnnnnnnnnnnnnnnnnnnnnnnnnnnnnnnnnnnnnnnnnnnnnnnnnnnnnnnnnnnnnnnnnnnnnnnnnnnnnnnnnnnnnnnnnnnnnnnnnnnnnnnnnnnnnnnnnnnnnnnnnnnnnnnnnnnnnnnnnnnnnnnnnnnnnnnnnnnnnnnnnnnnnnnnnnnnnnnnnnnnnnnnnnnnnnnnnnnnnnnnnnnnnnnnnnnnnnnnnnnnnnnnnnnnnnnnnnnnnnnnnnnnnnnnnnnnnnnnnnnnnnnnnnnnnnnnnnnnnnnnnnnnnnnnnnnnnnnnnnnnnnnnnnnnnnnnnnnnnnnnnnnnnnnnnnnnnnnnnnnnnnnnnnnnnnnnnnnnnnnnnnnnnnnnnnnnnnnnnnnnnnnnnnnnnnnnnnnnnnnnnnnnnnnnnnnnnnnnnnnnnnnnnnnnnnnnnnnnnnnnnnnnnnnnnnnnnnnnnnnnnnnnnnnnnnnnnnnnnnnnnnnnnnnnnnnnnnnnnnnnnnnnnnnnnnnnnnnnnnnnnnnnnnnnnnnnnnnnnnnnnnnnnnnnnnnnnnnnnnnnnnnnnnnnnnnnnnnnnnnnnnnnnnnnnnnnnnnnnnnnnnnnnnnnnnnnnnnnnnnnnnnnnnnnnnnnnnnnnnnnnnnnnnnnnnnnnnnnnnnnnnnnnnnnnnnnnnnnnnnnnnnnnnnnnnnnnnnnnnnnnnnnnnnnnnnnnnnnnnnnnnnnnnnnnnnnnnnnnnnnnnnnnnnnnnnnnnnnnnnnnnnnnnnnnnnnnnnnnnnnnnnnnnnnnnnnnnnnnnnnnnnnnnnnnnnnnnnnnnnnnnnnnnnnnnnnnnnnnnnnnnnnnnnnnnnnnnnnnnnnnnnnnnnnnnnnnnnnnnnnnnnnnnnnnnnnnnnnnnnnnnnnnnnnnnnnnnnnnnnnnnnnnnnnnnnnnnnnnnnnnnnnnnnnnnnnnnnnnnnnnnnnnnnnnnnnnnnnnnnnnnnnnnnnnnnnnnnnnnnnnnnnnnnnnnnnnnnnnnnnnnnnnnnnnnnnnnnnnnnnnnnnnnnnnnnnnnnnnnnnnnnnnnnnnnnnnnnnnnnnnnnnnnnnnnnnnnnnnnnnnnnnnnnnnnnnnnnnnnnnnnnnnnnnnnnnnnnnnnnnnnnnnnnnnnnnnnnnnnnnnnnnnnnnnnnnnnnnnnnnnnnnnnnnnnnnnnnnnnnnnnnnnnnnnnnnnnnnnnnnnnnnnnnnnnnnnnnnnnnnnnnnnnnnnnnnnnnnnnnnnnnnnnnnnnnnnnnnnnnnnnnnnnnnnnnnnnnnnnnnnnnnnnnnnnnnnnnnnnnnnnnnnnnnnnnnnnnnnnnnnnnnnnnnnnnnnnnnnnnnnnnnnnnnnnnnnnnnnnnnnnnnnnnnnnnnnnnnnnnnnnnnnnnnnnnnnnnnnnnnnnnnnnnnnnnnnnnnnnnnnnnnnnnnnnnnnnnnnnnnnnnnnnnnnnnnnnnnnnnnnnnnnnnnnnnnnnnnnnnnnnnnnnnnnnnnnnnnnnnnnnnnnnnnnnnnnnnnnnnnnnnnnnnnnnnnnnnnnnnnnnnnnnnnnnnnnnnnnnnnnnnnnnnnnnnnnnnnnnnnnnnnnnnnnnnnnnnnnnnnnnnnnnnnnnnnnnnnnnnnnnnnnnnnnnnnnnnnnnnnnnnnnnnnnnnnnnnnnnnnnnnnnnnnnnnnnnnnnnnnnnnnnnnnnnnnnnnnnnnnnnnnnnnnnnnnnnnnnnnnnnnnnnnnnnnnnnnnnnnnnnnnnnnnnnnnnnnnnnnnnnnnnnnnnnnnnnnnnnnnnnnnnnnnnnnnnnnnnnnnnnnnnnnnnnnnnnnnnnnnnnnnnnnnnnnnnnnnnnnnnnnnnnnnnnnnnnnnnnnnnnnnnnnnnnnnnnnnnnnnnnnnnnnnnnnnnnnnnnnnnnnnnnnnnnnnnnnnnnnnnnnnnnnnnnnnnnnnnnnnnnnnnnnnnnnnnnnnnnnnnnnnnnnnnnnnnnnnnnnnnnnnnnnnnnnnnnnnnnnnnnnnnnnnnnnnnnnnnnnnnnnnnnnnnnnnnnnnnnnnnnnnnnnnnnnnnnnnnnnnnnnnnnnnnnnnnnnnnnnnnnnnnnnnnnnnnnnnnnnnnnnnnnnnnnnnnnnnnnnnnnnnnnnnnnnnnnnnnnnnnnnnnnnnnnnnnnnnnnnnnnnnnnnnnnnnnnnnnnnnnnnnnnnnnnnnnnnnnnnnnnnnnnnnnnnnnnnnnnnnnnnnnnnnnnnnnnnnnnnnnnnnnnnnnnnnnnnnnnnnnnnnnnnnnnnnnnnnnnnnnnnnnnnnnnnnnnnnnnnnnnnnnnnnnnnnnnnnnnnnnnnnnnnnnnnnnnnnnnnnnnnnnnnnnnnnnnnnnnnnnnnnnnnnnnnnnnnnnnnnnnnnnnnnnnnnnnnnnnnnnnnnnnnnnnnnnnnnnnnnnnnnnnnnnnnnnnnnnnnnnnnnnnnnnnnnnnnnnnnnnnnnnnnnnnnnnnnnnnnnnnnnnnnnnnnnnnnnnnnnnnnnnnnnnnnnnnnnnnnnnnnnnnnnnnnnnnnnnnnnnnnnnnnnnnnnnnnnnnnnnnnnnnnnnnnnnnnnnnnnnnnnnnnnnnnnnnnnnnnnnnnnnnnnnnnnnnnnnnnnnnnnnnnnnnnnnnnnnnnnnnnnnnnnnnnnnnnnnnnnnnnnnnnnnnnnnnnnnnnnnnnnnnnnnnnnnnnnnnnnnnnnnnnnnnnnnnnnnnnnnnnnnnnnnnnnnnnnnnnnnnnnnnnnnnnnnnnnnnnnnnnnnnnnnnnnnnnnnnnnnnnnnnnnnnnnnnnnnnnnnnnnnnnnnnnnnnnnnnnnnnnnnnnnnnnnnnnnnnnnnnnnnnnnnnnnnnnnnnnnnnnnnnnnnnnnnnnnnnnnnnnnnnnnnnnnnnnnnnnnnnnnnnnnnnnnnnnnnnnnnnnnnnnnnnnnnnnnnnnnnnnnnnnnnnnnnnnnnnnnnnnnnnnnnnnnnnnnnnnnnnnnnnnnnnnnnnnnnnnnnnnnnnnnnnnnnnnnnnnnnnnnnnnnnnnnnnnnnnnnnnnnnnnnnnnnnnnnnnnnnnnnnnnnnnnnnnnnnnnnnnnnnnnnnnnnnnnnnnnnnnnnnnnnnnnnnnnnnnnnnnnnnnnnnnnnnnnnnnnnnnnnnnnnnnnnnnnnnnnnnnnnnnnnnnnnnnnnnnnnnnnnnnnnnnnnnnnnnnnnnnnnnnnnnnnnnnnnnnnnnnnnnnnnnnnnnnnnnnnnnnnnnnnnnnnnnnnnnnnnnnnnnnnnnnnnnnnnnnnnnnnnnnnnnnnnnnnnnnnnnnnnnnnnnnnnnnnnnnnnnnnnnnnnnnnnnnnnnnnnnnnnnnnnnnnnnnnnnnnnnnnnnnnnnnnnnnnnnnnnnnnnnnnnnnnnnnnnnnnnnnnnnnnnnnnnnnnnnnnnnnnnnnnnnnnnnnnnnnnnnnnnnnnnnnnnnnnnnnnnnnnnnnnnnnnnnnnnnnnnnnnnnnnnnnnnnnnnnnnnnnnnnnnnnnnnnnnnnnnnnnnnnnnnnnnnnnnnnnnnnnnnnnnnnnnnnnnnnnnnnnnnnnnnnnnnnnnnnnnnnnnnnnnnnnnnnnnnnnnnnnnnnnnnnnnnnnnnnnnnnnnnnnnnnnnnnnnnnnnnnnnnnnnnnnnnnnnnnnnnnnnnnnnnnnnnnnnnnnnnnnnnnnnnnnnnnnnnnnnnnnnnnnnnnnnnnnnnnnnnnnnnnnnnnnnnnnnnnnnnnnnnnnnnnnnnnnnnnnnnnnnnnnnnnnnnnnnnnnnnnnnnnnnnnnnnnnnnnnnnnnnnnnnnnnnnnnnnnnnnnnnnnnnnnnnnnnnnnnnnnnnnnnnnnnnnnnnnnnnnnnnnnnnnnnnnnnnnnnnnnnnnnnnnnnnnnnnnnnnnnnnnnnnnnnnnnnnnnnnnnnnnnnnnnnnnnnnnnnnnnnnnnnnnnnnnnnnnnnnnnnnnnnnnnnnnnnnnnnnnnnnnnnnnnnnnnnnnnnnnnnnnnnnnnnnnnnnnnnnnnnnnnnnnnnnnnnnnnnnnnnnnnnnnnnnnnnnnnnnnnnnnnnnnnnnnnnnnnnnnnnnnnnnnnnnnnnnnnnnnnnnnnnnnnnnnnnnnnnnnnnnnnnnnnnnnnnnnnnnnnnnnnnnnnnnnnnnnnnnnnnnnnnnnnnnnnnnnnnnnnnnnnnnnnnnnnnnnnnnnnnnnnnnnnnnnnnnnnnnnnnnnnnnnnnnnnnnnnnnnnnnnnnnnnnnnnnnnnnnnnnnnnnnnnnnnnnnnnnnnnnnnnnnnnnnnnnnnnnnnnnnnnnnnnnnnnnnnnnnnnnnnnnnnnnnnnnnnnnnnnnnnnnnnnnnnnnnnnnnnnnnnnnnnnnnnnnnnnnnnnnnnnnnnnnnnnnnnnnnnnnnnnnnnnnnnnnnnnnnnnnnnnnnnnnnnnnnnnnnnnnnnnnnnnnnnnnnnnnnnnnnnnnnnnnnnnnnnnnnnnnnnnnnnnnnnnnnnnnnnnnnnnnnnnnnnnnnnnnnnnnnnnnnnnnnnnnnnnnnnnnnnnnnnnnnnnnnnnnnnnnnnnnnnnnnnnnnnnnnnnnnnnnnnnnnnnnnnnnnnnnnnnnnnnnnnnnnnnnnnnnnnnnnnnnnnnnnnnnnnnnnnnnnnnnnnnnnnnnnnnnnnnnnnnnnnnnnnnnnnnnnnnnnnnnnnnnnnnnnnnnnnnnnnnnnnnnnnnnnnnnnnnnnnnnnnnnnnnnnnnnnnnnnnnnnnnnnnnnnnnnnnnnnnnnnnnnnnnnnnnnnnnnnnnnnnnnnnnnnnnnnnnnnnnnnnnnnnnnnnnnnnnnnnnnnnnnnnnnnnnnnnnnnnnnnnnnnnnnnnnnnnnnnnnnnnnnnnnnnnnnnnnnnnnnnnnnnnnnnnnnnnnnnnnnnnnnnnnnnnnnnnnnnnnnnnnnnnnnnnnnnnnnnnnnnnnnnnnnnnnnnnnnnnnnnnnnnnnnnnnnnnnnnnnnnnnnnnnnnnnnnnnnnnnnnnnnnnnnnnnnnnnnnnnnnnnnnnnnnnnnnnnnnnnnnnnnnnnnnnnnnnnnnnnnnnnnnnnnnnnnnnnnnnnnnnnnnnnnnnnnnnnnnnnnnnnnnnnnnnnnnnnnnnnnnnnnnnnnnnnnnnnnnnnnnnnnnnnnnnnnnnnnnnnnnnnnnnnnnnnnnnnnnnnnnnnnnnnnnnnnnnnnnnnnnnnnnnnnnnnnnnnnnnnnnnnnnnnnnnnnnnnnnnnnnnnnnnnnnnnnnnnnnnnnnnnnnnnnnnnnnnnnnnnnnnnnnnnnnnnnnnnnnnnnnnnnnnnnnnnnnnnnnnnnnnnnnnnnnnnnnnnnnnnnnnnnnnnnnnnnnnnnnnnnnnnnnnnnnnnnnnnnnnnnnnnnnnnnnnnnnnnnnnnnnnnnnnnnnnnnnnnnnnnnnnnnnnnnnnnnnnnnnnnnnnnnnnnnnnnnnnnnnnnnnnnnnnnnnnnnnnnnnnnnnnnnnnnnnnnnnnnnnnnnnnnnnnnnnnnnnnnnnnnnnnnnnnnnnnnnnnnnnnnnnnnnnnnnnnnnnnnnnnnnnnnnnnnnnnnnnnnnnnnnnnnnnnnnnnnnnnnnnnnnnnnnnnnnnnnnnnnnnnnnnnnnnnnnnnnnnnnnnnnnnnnnnnnnnnnnnnnnnnnnnnnnnnnnnnnnnnnnnnnnnnnnnnnnnnnnnnnnnnnnnnnnnnnnnnnnnnnnnnnnnnnnnnnnnnnnnnnnnnnnnnnnnnnnnnnnnnnnnnnnnnnnnnnnnnnnnnnnnnnnnnnnnnnnnnnnnnnnnnnnnnnnnnnnnnnnnnnnnnnnnnnnnnnnnnnnnnnnnnnnnnnnnnnnnnnnnnnnnnnnnnnnnnnnnnnnnnnnnnnnnnnnnnnnnnnnnnnnnnnnnnnnnnnnnnnnnnnnnnnnnnnnnnnnnnnnnnnnnnnnnnnnnnnnnnnnnnnnnnnnnnnnnnnnnnnnnnnnnnnnnnnnnnnnnnnnnnnnnnnnnnnnnnnnnnnnnnnnnnnnnnnnnnnnnnnnnnnnnnnnnnnnnnnnnnnnnnnnnnnnnnnnnnnnnnnnnnnnnnnnnnnnnnnnnnnnnnnnnnnnnnnnnnnnnnnnnnnnnnnnnnnnnnnnnnnnnnnnnnnnnnnnnnnnnnnnnnnnnnnnnnnnnnnnnnnnnnnnnnnnnnnnnnnnnnnnnnnnnnnnnnnnnnnnnnnnnnnnnnnnnnnnnnnnnnnnnnnnnnnnnnnnnnnnnnnnnnnnnnnnnnnnnnnnnnnnnnnnnnnnnnnnnnnnnnnnnnnnnnnnnnnnnnnnnnnnnnnnnnnnnnnnnnnnnnnnnnnnnnnnnnnnnnnnnnnnnnnnnnnnnnnnnnnnnnnnnnnnnnnnnnnnnnnnnnnnnnnnnnnnnnnnnnnnnnnnnnnnnnnnnnnnnnnnnnnnnnnnnnnnnnnnnnnnnnnnnnnnnnnnnnnnnnnnnnnnnnnnnnnnnnnnnnnnnnnnnnnnnnnnnnnnnnnnnnnnnnnnnnnnnnnnnnnnnnnnnnnnnnnnnnnnnnnnnnnnnnnnnnnnnnnnnnnnnnnnnnnnnnnnnnnnnnnnnnnnnnnnnnnnnnnnnnnnnnnnnnnnnnnnnnnnnnnnnnnnnnnnnnnnnnnnnnnnnnnnnnnnnnnnnnnnnnnnnnnnnnnnnnnnnnnnnnnnnnnnnnnnnnnnnnnnnnnnnnnnnnnnnnnnnnnnnnnnnnnnnnnnnnnnnnnnnnnnnnnnnnnnnnnnnnnnnnnnnnnnnnnnnnnnnnnnnnnnnnnnnnnnnnnnnnnnnnnnnnnnnnnnnnnnnnnnnnnnnnnnnnnnnnnnnnnnnnnnnnnnnnnnnnnnnnnnnnnnnnnnnnnnnnnnnnnnnnnnnnnnnnnnnnnnnnnnnnnnnnnnnnnnnnnnnnnnnnnnnnnnnnnnnnnnnnnnnnnnnnnnnnnnnnnnnnnnnnnnnnnnnnnnnnnnnnnnnnnnnnnnnnnnnnnnnnnnnnnnnnnnnnnnnnnnnnnnnnnnnnnnnnnnnnnnnnnnnnnnnnnnnnnnnnnnnnnnnnnnnnnnnnnnnnnnnnnnnnnnnnnnnnnnnnnnnnnnnnnnnnnnnnnnnnnnnnnnnnnnnnnnnnnnnnnnnnnnnnnnnnnnnnnnnnnnnnnnnnnnnnnnnnnnnnnnnnnnnnnnnnnnnnnnnnnnnnnnnnnnnnnnnnnnnnnnnnnnnnnnnnnnnnnnnnnnnnnnnnnnnnnnnnnnnnnnnnnnnnnnnnnnnnnnnnnnnnnnnnnnnnnnnnnnnnnnnnnnnnnnnnnnnnnnnnnnnnnnnnnnnnnnnnnnnnnnnnnnnnnnnnnnnnnnnnnnnnnnnnnnnnnnnnnnnnnnnnnnnnnnnnnnnnnnnnnnnnnnnnnnnnnnnnnnnnnnnnnnnnnnnnnnnnnnnnnnnnnnnnnnnnnnnnnnnnnnnnnnnnnnnnnnnnnnnnnnnnnnnnnnnnnnnnnnnnnnnnnnnnnnnnnnnnnnnnnnnnnnnnnnnnnnnnnnnnnnnnnnnnnnnnnnnnnnnnnnnnnnnnnnnnnnnnnnnnnnnnnnnnnnnnnnnnnnnnnnnnnnnnnnnnnnnnnnnnnnnnnnnnnnnnnnnnnnnnnnnnnnnnnnnnnnnnnnnnnnnnnnnnnnnnnnnnnnnnnnnnnnnnnnnnnnnnnnnnnnnnnnnnnnnnnnnnnnnnnnnnnnnnnnnnnnnnnnnnnnnnnnnnnnnnnnnnnnnnnnnnnnnnnnnnnnnnnnnnnnnnnnnnnnnnnnnnnnnnnnnnnnnnnnnnnnnnnnnnnnnnnnnnnnnnnnnnnnnnnnnnnnnnnnnnnnnnnnnnnnnnnnnnnnnnnnnnnnnnnnnnnnnnnnnnnnnnnnnnnnnnnnnnnnnnnnnnnnnnnnnnnnnnnnnnnnnnnnnnnnnnnnnnnnnnnnnnnnnnnnnnnnnnnnnnnnnnnnnnnnnnnnnnnnnnnnnnnnnnnnnnnnnnnnnnnnnnnnnnnnnnnnnnnnnnnnnnnnnnnnnnnnnnnnnnnnnnnnnnnnnnnnnnnnnnnnnnnnnnnnnnnnnnnnnnnnnnnnnnnnnnnnnnnnnnnnnnnnnnnnnnnnnnnnnnnnnnnnnnnnnnnnnnnnnnnnnnnnnnnnnnnnnnnnnnnnnnnnnnnnnnnnnnnnnnnnnnnnnnnnnnnnnnnnnnnnnnnnnnnnnnnnnnnnnnnnnnnnnnnnnnnnnnnnnnnnnnnnnnnnnnnnnnnnnnnnnnnnnnnnnnnnnnnnnnnnnnnnnnnnnnnnnnnnnnnnnnnnnnnnnnnnnnnnnnnnnnnnnnnnnnnnnnnnnnnnnnnnnnnnnnnnnnnnnnnnnnnnnnnnnnnnnnnnnnnnnnnnnnnnnnnnnnnnnnnnnnnnnnnnnnnnnnnnnnnnnnnnnnnnnnnnnnnnnnnnnnnnnnnnnnnnnnnnnnnnnnnnnnnnnnnnnnnnnnnnnnnnnnnnnnnnnnnnnnnnnnnnnnnnnnnnnnnnnnnnnnnnnnnnnnnnnnnnnnnnnnnnnnnnnnnnnnnnnnnnnnnnnnnnnnnnnnnnnnnnnnnnnnnnnnnnnnnnnnnnnnnnnnnnnnnnnnnnnnnnnnnnnnnnnnnnnnnnnnnnnnnnnnnnnnnnnnnnnnnnnnnnnnnnnnnnnnnnnnnnnnnnnnnnnnnnnnnnnnnnnnnnnnnnnnnnnnnnnnnnnnnnnnnnnnnnnnnnnnnnnnnnnnnnnnnnnnnnnnnnnnnnnnnnnnnnnnnnnnnnnnnnnnnnnnnnnnnnnnnnnnnnnnnnnnnnnnnnnnnnnnnnnnnnnnnnnnnnnnnnnnnnnnnnnnnnnnnnnnnnnnnnnnnnnnnnnnnnnnnnnnnnnnnnnnnnnnnnnnnnnnnnnnnnnnnnnnnnnnnnnnnnnnnnnnnnnnnnnnnnnnnnnnnnnnnnnnnnnnnnnnnnnnnnnnnnnnnnnnnnnnnnnnnnnnnnnnnnnnnnnnnnnnnnnnnnnnnnnnnnnnnnnnnnnnnnnnnnnnnnnnnnnnnnnnnnnnnnnnnnnnnnnnnnnnnnnnnnnnnnnnnnnnnnnnnnnnnnnnnnnnnnnnnnnnnnnnnnnnnnnnnnnnnnnnnnnnnnnnnnnnnnnnnnnnnnnnnnnnnnnnnnnnnnnnnnnnnnnnnnnnnnnnnnnnnnnnnnnnnnnnnnnnnnnnnnnnnnnnnnnnnnnnnnnnnnnnnnnnnnnnnnnnnnnnnnnnnnnnnnnnnnnnnnnnnnnnnnnnnnnnnnnnnnnnnnnnnnnnnnnnnnnnnnnnnnnnnnnnnnnnnnnnnnnnnnnnnnnnnnnnnnnnnnnnnnnnnnnnnnnnnnnnnnnnnnnnnnnnnnnnnnnnnnnnnnnnnnnnnnnnnnnnnnnnnnnnnnnnnnnnnnnnnnnnnnnnnnnnnnnnnnnnnnnnnnnnnnnnnnnnnnnnnnnnnnnnnnnnnnnnnnnnnnnnnnnnnnnnnnnnnnnnnnnnnnnnnnnnnnnnnnnnnnnnnnnnnnnnnnnnnnnnnnnnnnnnnnnnnnnnnnnnnnnnnnnnnnnnnnnnnnnnnnnnnnnnnnnnnnnnnnnnnnnnnnnnnnnnnnnnnnnnnnnnnnnnnnnnnnnnnnnnnnnnnnnnnnnnnnnnnnnnnnnnnnnnnnnnnnnnnnnnnnnnnnnnnnnnnnnnnnnnnnnnnnnnnnnnnnnnnnnnnnnnnnnnnnnnnnnnnnnnnnnnnnnnnnnnnnnnnnnnnnnnnnnnnnnnnnnnnnnnnnnnnnnnnnnnnnnnnnnnnnnnnnnnnnnnnnnnnnnnnnnnnnnnnnnnnnnnnnnnnnnnnnnnnnnnnnnnnnnnnnnnnnnnnnnnnnnnnnnnnnnnnnnnnnnnnnnnnnnnnnnnnnnnnnnnnnnnnnnnnnnnnnnnnnnnnnnnnnnnnnnnnnnnnnnnnnnnnnnnnnnnnnnnnnnnnnnnnnnnnnnnnnnnnnnnnnnnnnnnnnnnnnnnnnnnnnnnnnnnnnnnnnnnnnnnnnnnnnnnnnnnnnnnnnnnnnnnnnnnnnnnnnnnnnnnnnnnnnnnnnnnnnnnnnnnnnnnnnnnnnnnnnnnnnnnnnnnnnnnnnnnnnnnnnnnnnnnnnnnnnnnnnnnnnnnnnnnnnnnnnnnnnnnnnnnnnnnnnnnnnnnnnnnnnnnnnnnnnnnnnnnnnnnnnnnnnnnnnnnnnnnnnnnnnnnnnnnnnnnnnnnnnnnnnnnnnnnnnnnnnnnnnnnnnnnnnnnnnnnnnnnnnnnnnnnnnnnnnnnnnnnnnnnnnnnnnnnnnnnnnnnnnnnnnnnnnnnnnnnnnnnnnnnnnnnnnnnnnnnnnnnnnnnnnnnnnnnnnnnnnnnnnnnnnnnnnnnnnnnnnnnnnnnnnnnnnnnnnnnnnnnnnnnnnnnnnnnnnnnnnnnnnnnnnnnnnnnnnnnnnnnnnnnnnnnnnnnnnnnnnnnnnnnnnnnnnnnnnnnnnnnnnnnnnnnnnnnnnnnnnnnnnnnnnnnnnnnnnnnnnnnnnnnnnnnnnnnnnnnnnnnnnnnnnnnnnnnnnnnnnnnnnnnnnnnnnnnnnnnnnnnnnnnnnnnnnnnnnnnnnnnnnnnnnnnnnnnnnnnnnnnnnnnnnnnnnnnnnnnnnnnnnnnnnnnnnnnnnnnnnnnnnnnnnnnnnnnnnnnnnnnnnnnnnnnnnnnnnnnnnnnnnnnnnnnnnnnnnnnnnnnnnnnnnnnnnnnnnnnnnnnnnnnnnnnnnnnnnnnnnnnnnnnnnnnnnnnnnnnnnnnnnnnnnnnnnnnnnnnnnnnnnnnnnnnnnnnnnnnnnnnnnnnnnnnnnnnnnnnnnnnnnnnnnnnnnnnnnnnnnnnnnnnnnnnnnnnnnnnnnnnnnnnnnnnnnnnnnnnnnnnnnnnnnnnnnnnnnnnnnnnnnnnnnnnnnnnnnnnnnnnnnnnnnnnnnnnnnnnnnnnnnnnnnnnnnnnnnnnnnnnnnnnnnnnnnnnnnnnnnnnnnnnnnnnnnnnnnnnnnnnnnnnnnnnnnnnnnnnnnnnnnnnnnnnnnnnnnnnnnnnnnnnnnnnnnnnnnnnnnnnnnnnnnnnnnnnnnnnnnnnnnnnnnnnnnnnnnnnnnnnnnnnnnnnnnnnnnnnnnnnnnnnnnnnnnnnnnnnnnnnnnnnnnnnnnnnnnnnnnnnnnnnnnnnnnnnnnnnnnnnnnnnnnnnnnnnnnnnnnnnnnnnnnnnnnnnnnnnnnnnnnnnnnnnnnnnnnnnnnnnnnnnnnnnnnnnnnnnnnnnnnnnnnnnnnnnnnnnnnnnnnnnnnnnnnnnnnnnnnnnnnnnnnnnnnnnnnnnnnnnnnnnnnnnnnnnnnnnnnnnnnnnnnnnnnnnnnnnnnnnnnnnnnnnnnnnnnnnnnnnnnnnnnnnnnnnnnnnnnnnnnnnnnnnnnnnnnnnnnnnnnnnnnnnnnnnnnnnnnnnnnnnnnnnnnnnnnnnnnnnnnnnnnnnnnnnnnnnnnnnnnnnnnnnnnnnnnnnnnnnnnnnnnnnnnnnnnnnnnnnnnnnnnnnnnnnnnnnnnnnnnnnnnnnnnnnnnnnnnnnnnnnnnnnnnnnnnnnnnnnnnnnnnnnnnnnnnnnnnnnnnnnnnnnnnnnnnnnnnnnnnnnnnnnnnnnnnnnnnnnnnnnnnnnnnnnnnnnnnnnnnnnnnnnnnnnnnnnnnnnnnnnnnnnnnnnnnnnnnnnnnnnnnnnnnnnnnnnnnnnnnnnnnnnnnnnnnnnnnnnnnnnnnnnnnnnnnnnnnnnnnnnnnnnnnnnnnnnnnnnnnnnnnnnnnnnnnnnnnnnnnnnnnnnnnnnnnnnnnnnnnnnnnnnnnnnnnnnnnnnnnnnnnnnnnnnnnnnnnnnnnnnnnnnnnnnnnnnnnnnnnnnnnnnnnnnnnnnnnnnnnnnnnnnnnnnnnnnnnnnnnnnnnnnnnnnnnnnnnnnnnnnnnnnnnnnnnnnnnnnnnnnnnnnnnnnnnnnnnnnnnnnnnnnnnnnnnnnnnnnnnnnnnnnnnnnnnnnnnnnnnnnnnnnnnnnnnnnnnnnnnnnnnnnnnnnnnnnnnnnnnnnnnnnnnnnnnnnnnnnnnnnnnnnnnnnnnnnnnnnnnnnnnnnnnnnnnnnnnnnnnnnnnnnnnnnnnnnnnnnnnnnnnnnnnnnnnnnnnnnnnnnnnnnnnnnnnnnnnnnnnnnnnnnnnnnnnnnnnnnnnnnnnnnnnnnnnnnnnnnnnnnnnnnnnnnnnnnnnnnnnnnnnnnnnnnnnnnnnnnnnnnnnnnnnnnnnnnnnnnnnnnnnnnnnnnnnnnnnnnnnnnnnnnnnnnnnnnnnnnnnnnnnnnnnnnnnnnnnnnnnnnnnnnnnnnnnnnnnnnnnnnnnnnnnnnnnnnnnnnnnnnnnnnnnnnnnnnnnnnnnnnnnnnnnnnnnnnnnnnnnnnnnnnnnnnnnnnnnnnnnnnnnnnnnnnnnnnnnnnnnnnnnnnnnnnnnnnnnnnnnnnnnnnnnnnnnnnnnnnnnnnnnnnnnnnnnnnnnnnnnnnnnnnnnnnnnnnnnnnnnnnnnnnnnnnnnnnnnnnnnnnnnnnnnnnnnnnnnnnnnnnnnnnnnnnnnnnnnnnnnnnnnnnnnnnnnnnnnnnnnnnnnnnnnnnnnnnnnnnnnnnnnnnnnnnnnnnnnnnnnnnnnnnnnnnnnnnnnnnnnnnnnnnnnnnnnnnnnnnnnnnnnnnnnnnnnnnnnnnnnnnnnnnnnnnnnnnnnnnnnnnnnnnnnnnnnnnnnnnnnnnnnnnnnnnnnnnnnnnnnnnnnnnnnnnnnnnnnnnnnnnnnnnnnnnnnnnnnnnnnnnnnnnnnnnnnnnnnnnnnnnnnnnnnnnnnnnnnnnnnnnnnnnnnnnnnnnnnnnnnnnnnnnnnnnnnnnnnnnnnnnnnnnnnnnnnnnnnnnnnnnnnnnnnnnnnnnnnnnnnnnnnnnnnnnnnnnnnnnnnnnnnnnnnnnnnnnnnnnnnnnnnnnnnnnnnnnnnnnnnnnnnnnnnnnnnnnnnnnnnnnnnnnnnnnnnnnnnnnnnnnnnnnnnnnnnnnnnnnnnnnnnnnnnnnnnnnnnnnnnnnnnnnnnnnnnnnnnnnnnnnnnnnnnnnnnnnnnnnnnnnnnnnnnnnnnnnnnnnnnnnnnnnnnnnnnnnnnnnnnnnnnnnnnnnnnnnnnnnnnnnnnnnnnnnnnnnnnnnnnnnnnnnnnnnnnnnnnnnnnnnnnnnnnnnnnnnnnnnnnnnnnnnnnnnnnnnnnnnnnnnnnnnnnnnnnnnnnnnnnnnnnnnnnnnnnnnnnnnnnnnnnnnnnnnnnnnnnnnnnnnnnnnnnnnnnnnnnnnnnnnnnnnnnnnnnnnnnnnnnnnnnnnnnnnnnnnnnnnnnnnnnnnnnnnnnnnnnnnnnnnnnnnnnnnnnnnnnnnnnnnnnnnnnnnnnnnnnnnnnnnnnnnnnnnnnnnnnnnnnnnnnnnnnnnnnnnnnnnnnnnnnnnnnnnnnnnnnnnnnnnnnnnnnnnnnnnnnnnnnnnnnnnnnnnnnnnnnnnnnnnnnnnnnnnnnnnnnnnnnnnnnnnnnnnnnnnnnnnnnnnnnnnnnnnnnnnnnnnnnnnnnnnnnnnnnnnnnnnnnnnnnnnnnnnnnnnnnnnnnnnnnnnnnnnnnnnnnnnnnnnnnnnnnnnnnnnnnnnnnnnnnnnnnnnnnnnnnnnnnnnnnnnnnnnnnnnnnnnnnnnnnnnnnnnnnnnnnnnnnnnnnnnnnnnnnnnnnnnnnnnnnnnnnnnnnnnnnnnnnnnnnnnnnnnnnnnnnnnnnnnnnnnnnnnnnnnnnnnnnnnnnnnnnnnnnnnnnnnnnnnnnnnnnnnnnnnnnnnnnnnnnnnnnnnnnnnnnnnnnnnnnnnnnnnnnnnnnnnnnnnnnnnnnnnnnnnnnnnnnnnnnnnnnnnnnnnnnnnnnnnnnnnnnnnnnnnnnnnnnnnnnnnnnnnnnnnnnnnnnnnnnnnnnnnnnnnnnnnnnnnnnnnnnnnnnnnnnnnnnnnnnnnnnnnnnnnnnnnnnnnnnnnnnnnnnnnnnnnnnnnnnnnnnnnnnnnnnnnnnnnnnnnnnnnnnnnnnnnnnnnnnnnnnnnnnnnnnnnnnnnnnnnnnnnnnnnnnnnnnnnnnnnnnnnnnnnnnnnnnnnnnnnnnnnnnnnnnnnnnnnnnnnnnnnnnnnnnnnnnnnnnnnnnnnnnnnnnnnnnnnnnnnnnnnnnnnnnnnnnnnnnnnnnnnnnnnnnnnnnnnnnnnnnnnnnnnnnnnnnnnnnnnnnnnnnnnnnnnnnnnnnnnnnnnnnnnnnnnnnnnnnnnnnnnnnnnnnnnnnnnnnnnnnnnnnnnnnnnnnnnnnnnnnnnnnnnnnnnnnnnnnnnnnnnnnnnnnnnnnnnnnnnnnnnnnnnnnnnnnnnnnnnnnnnnnnnnnnnnnnnnnnnnnnnnnnnnnnnnnnnnnnnnnnnnnnnnnnnnnnnnnnnnnnnnnnnnnnnnnnnnnnnnnnnnnnnnnnnnnnnnnnnnnnnnnnnnnnnnnnnnnnnnnnnnnnnnnnnnnnnnnnnnnnnnnnnnnnnnnnnnnnnnnnnnnnnnnnnnnnnnnnnnnnnnnnnnnnnnnnnnnnnnnnnnnnnnnnnnnnnnnnnnnnnnnnnnnnnnnnnnnnnnnnnnnnnnnnnnnnnnnnnnnnnnnnnnnnnnnnnnnnnnnnnnnnnnnnnnnnnnnnnnnnnnnnnnnnnnnnnnnnnnnnnnnnnnnnnnnnnnnnnnnnnnnnnnnnnnnnnnnnnnnnnnnnnnnnnnnnnnnnnnnnnnnnnnnnnnnnnnnnnnnnnnnnnnnnnnnnnnnnnnnnnnnnnnnnnnnnnnnnnnnnnnnnnnnnnnnnnnnnnnnnnnnnnnnnnnnnnnnnnnnnnnnnnnnnnnnnnnnnnnnnnnnnnnnnnnnnnnnnnnnnnnnnnnnnnnnnnnnnnnnnnnnnnnnnnnnnnnnnnnnnnnnnnnnnnnnnnnnnnnnnnnnnnnnnnnnnnnnnnnnnnnnnnnnnnnnnnnnnnnnnnnnnnnnnnnnnnnnnnnnnnnnnnnnnnnnnnnnnnnnnnnnnnnnnnnnnnnnnnnnnnnnnnnnnnnnnnnnnnnnnnnnnnnnnnnnnnnnnnnnnnnnnnnnnnnnnnnnnnnnnnnnnnnnnnnnnnnnnnnnnnnnnnnnnnnnnnnnnnnnnnnnnnnnnnnnnnnnnnnnnnnnnnnnnnnnnnnnnnnnnnnnnnnnnnnnnnnnnnnnnnnnnnnnnnnnnnnnnnnnnnnnnnnnnnnnnnnnnnnnnnnnnnnnnnnnnnnnnnnnnnnnnnnnnnnnnnnnnnnnnnnnnnnnnnnnnnnnnnnnnnnnnnnnnnnnnnnnnnnnnnnnnnnnnnnnnnnnnnnnnnnnnnnnnnnnnnnnnnnnnnnnnnnnnnnnnnnnnnnnnnnnnnnnnnnnnnnnnnnnnnnnnnnnnnnnnnnnnnnnnnnnnnnnnnnnnnnnnnnnnnnnnnnnnnnnnnnnnnnnnnnnnnnnnnnnnnnnnnnnnnnnnnnnnnnnnnnnnnnnnnnnnnnnnnnnnnnnnnnnnnnnnnnnnnnnnnnnnnnnnnnnnnnnnnnnnnnnnnnnnnnnnnnnnnnnnnnnnnnnnnnnnnnnnnnnnnnnnnnnnnnnnnnnnnnnnnnnnnnnnnnnnnnnnnnnnnnnnnnnnnnnnnnnnnnnnnnnnnnnnnnnnnnnnnnnnnnnnnnnnnnnnnnnnnnnnnnnnnnnnnnnnnnnnnnnnnnnnnnnnnnnnnnnnnnnnnnnnnnnnnnnnnnnnnnnnnnnnnnnnnnnnnnnnnnnnnnnnnnnnnnnnnnnnnnnnnnnnnnnnnnnnnnnnnnnnnnnnnnnnnnnnnnnnnnnnnnnnnnnnnnnnnnnnnnnnnnnnnnnnnnnnnnnnnnnnnnnnnnnnnnnnnnnnnnnnnnnnnnnnnnnnnnnnnnnnnnnnnnnnnnnnnnnnnnnnnnnnnnnnnnnnnnnnnnnnnnnnnnnnnnnnnnnnnnnnnnnnnnnnnnnnnnnnnnnnnnnnnnnnnnnnnnnnnnnnnnnnnnnnnnnnnnnnnnnnnnnnnnnnnnnnnnnnnnnnnnnnnnnnnnnnnnnnnnnnnnnnnnnnnnnnnnnnnnnnnnnnnnnnnnnnnnnnnnnnnnnnnnnnnnnnnnnnnnnnnnnnnnnnnnnnnnnnnnnnnnnnnnnnnnnnnnnnnnnnnnnnnnnnnnnnnnnnnnnnnnnnnnnnnnnnnnnnnnnnnnnnnnnnnnnnnnnnnnnnnnnnnnnnnnnnnnnnnnnnnnnnnnnnnnnnnnnnnnnnnnnnnnnnnnnnnnnnnnnnnnnnnnnnnnnnnnnnnnnnnnnnnnnnnnnnnnnnnnnnnnnnnnnnnnnnnnnnnnnnnnnnnnnnnnnnnnnnnnnnnnnnnnnnnnnnnnnnnnnnnnnnnnnnnnnnnnnnnnnnnnnnnnnnnnnnnnnnnnnnnnnnnnnnnnnnnnnnnnnnnnnnnnnnnnnnnnnnnnnnnnnnnnnnnnnnnnnnnnnnnnnnnnnnnnnnnnnnnnnnnnnnnnnnnnnnnnnnnnnnnnnnnnnnnnnnnnnnnnnnnnnnnnnnnnnnnnnnnnnnnnnnnnnnnnnnnnnnnnnnnnnnnnnnnnnnnnnnnnnnnnnnnnnnnnnnnnnnnnnnnnnnnnnnnnnnnnnnnnnnnnnnnnnnnnnnnnnnnnnnnnnnnnnnnnnnnnnnnnnnnnnnnnnnnnnnnnnnnnnnnnnnnnnnnnnnnnnnnnnnnnnnnnnnnnnnnnnnnnnnnnnnnnnnnnnnnnnnnnnnnnnnnnnnnnnnnnnnnnnnnnnnnnnnnnnnnnnnnnnnnnnnnnnnnnnnnnnnnnnnnnnnnnnnnnnnnnnnnnnnnnnnnnnnnnnnnnnnnnnnnnnnnnnnnnnnnnnnnnnnnnnnnnnnnnnnnnnnnnnnnnnnnnnnnnnnnnnnnnnnnnnnnnnnnnnnnnnnnnnnnnnnnnnnnnnnnnnnnnnnnnnnnnnnnnnnnnnnnnnnnnnnnnnnnnnnnnnnnnnnnnnnnnnnnnnnnnnnnnnnnnnnnnnnnnnnnnnnnnnnnnnnnnnnnnnnnnnnnnnnnnnnnnnnnnnnnnnnnnnnnnnnnnnnnnnnnnnnnnnnnnnnnnnnnnnnnnnnnnnnnnnnnnnnnnnnnnnnnnnnnnnnnnnnnnnnnnnnnnnnnnnnnnnnnnnnnnnnnnnnnnnnnnnnnnnnnnnnnnnnnnnnnnnnnnnnnnnnnnnnnnnnnnnnnnnnnnnnnnnnnnnnnnnnnnnnnnnnnnnnnnnnnnnnnnnnnnnnnnnnnnnnnnnnnnnnnnnnnnnnnnnnnnnnnnnnnnnnnnnnnnnnnnnnnnnnnnnnnnnnnnnnnnnnnnnnnnnnnnnnnnnnnnnnnnnnnnnnnnnnnnnnnnnnnnnnnnnnnnnnnnnnnnnnnnnnnnnnnnnnnnnnnnnnnnnnnnnnnnnnnnnnnnnnnnnnnnnnnnnnnnnnnnnnnnnnnnnnnnnnnnnnnnnnnnnnnnnnnnnnnnnnnnnnnnnnnnnnnnnnnnnnnnnnnnnnnnnnnnnnnnnnnnnnnnnnnnnnnnnnnnnnnnnnnnnnnnnnnnnnnnnnnnnnnnnnnnnnnnnnnnnnnnnnnnnnnnnnnnnnnnnnnnnnnnnnnnnnnnnnnnnnnnnnnnnnnnnnnnnnnnnnnnnnnnnnnnnnnnnnnnnnnnnnnnnnnnnnnnnnnnnnnnnnnnnnnnnnnnnnnnnnnnnnnnnnnnnnnnnnnnnnnnnnnnnnnnnnnnnnnnnnnnnnnnnnnnnnnnnnnnnnnnnnnnnnnnnnnnnnnnnnnnnnnnnnnnnnnnnnnnnnnnnnnnnnnnnnnnnnnnnnnnnnnnnnnnnnnnnnnnnnnnnnnnnnnnnnnnnnnnnnnnnnnnnnnnnnnnnnnnnnnnnnnnnnnnnnnnnnnnnnnnnnnnnnnnnnnnnnnnnnnnnnnnnnnnnnnnnnnnnnnnnnnnnnnnnnnnnnnnnnnnnnnnnnnnnnnnnnnnnnnnnnnnnnnnnnnnnnnnnnnnnnnnnnnnnnnnnnnnnnnnnnnnnnnnnnnnnnnnnnnnnnnnnnnnnnnnnnnnnnnnnnnnnnnnnnnnnnnnnnnnnnnnnnnnnnnnnnnnnnnnnnnnnnnnnnnnnnnnnnnnnnnnnnnnnnnnnnnnnnnnnnnnnnnnnnnnnnnnnnnnnnnnnnnnnnnnnnnnnnnnnnnnnnnnnnnnnnnnnnnnnnnnnnnnnnnnnnnnnnnnnnnnnnnnnnnnnnnnnnnnnnnnnnnnnnnnnnnnnnnnnnnnnnnnnnnnnnnnnnnnnnnnnnnnnnnnnnnnnnnnnnnnnnnnnnnnnnnnnnnnnnnnnnnnnnnnnnnnnnnnnnnnnnnnnnnnnnnnnnnnnnnnnnnnnnnnnnnnnnnnnnnnnnnnnnnnnnnnnnnnnnnnnnnnnnnnnnnnnnnnnnnnnnnnnnnnnnnnnnnnnnnnnnnnnnnnnnnnnnnnnnnnnnnnnnnnnnnnnnnnnnnnnnnnnnnnnnnnnnnnnnnnnnnnnnnnnnnnnnnnnnnnnnnnnnnnnnnnnnnnnnnnnnnnnnnnnnnnnnnnnnnnnnnnnnnnnnnnnnnnnnnnnnnnnnnnnnnnnnnnnnnnnnnnnnnnnnnnnnnnnnnnnnnnnnnnnnnnnnnnnnnnnnnnnnnnnnnnnnnnnnnnnnnnnnnnnnnnnnnnnnnnnnnnnnnnnnnnnnnnnnnnnnnnnnnnnnnnnnnnnnnnnnnnnnnnnnnnnnnnnnnnnnnnnnnnnnnnnnnnnnnnnnnnnnnnnnnnnnnnnnnnnnnnnnnnnnnnnnnnnnnnnnnnnnnnnnnnnnnnnnnnnnnnnnnnnnnnnnnnnnnnnnnnnnnnnnnnnnnnnnnnnnnnnnnnnnnnnnnnnnnnnnnnnnnnnnnnnnnnnnnnnnnnnnnnnnnnnnnnnnnnnnnnnnnnnnnnnnnnnnnnnnnnnnnnnnnnnnnnnnnnnnnnnnnnnnnnnnnnnnnnnnnnnnnnnnnnnnnnnnnnnnnnnnnnnnnnnnnnnnnnnnnnnnnnnnnnnnnnnnnnnnnnnnnnnnnnnnnnnnnnnnnnnnnnnnnnnnnnnnnnnnnnnnnnnnnnnnnnnnnnnnnnnnnnnnnnnnnnnnnnnnnnnnnnnnnnnnnnnnnnnnnnnnnnnnnnnnnnnnnnnnnnnnnnnnnnnnnnnnnnnnnnnnnnnnnnnnnnnnnnnnnnnnnnnnnnnnnnnnnnnnnnnnnnnnnnnnnnnnnnnnnnnnnnnnnnnnnnnnnnnnnnnnnnnnnnnnnnnnnnnnnnnnnnnnnnnnnnnnnnnnnnnnnnnnnnnnnnnnnnnnnnnnnnnnnnnnnnnnnnnnnnnnnnnnnnnnnnnnnnnnnnnnnnnnnnnnnnnnnnnnnnnnnnnnnnnnnnnnnnnnnnnnnnnnnnnnnnnnnnnnnnnnnnnnnnnnnnnnnnnnnnnnnnnnnnnnnnnnnnnnnnnnnnnnnnnnnnnnnnnnnnnnnnnnnnnnnnnnnnnnnnnnnnnnnnnnnnnnnnnnnnnnnnnnnnnnnnnnnnnnnnnnnnnnnnnnnnnnnnnnnnnnnnnnnnnnnnnnnnnnnnnnnnnnnnnnnnnnnnnnnnnnnnnnnnnnnnnnnnnnnnnnnnnnnnnnnnnnnnnnnnnnnnnnnnnnnnnnnnnnnnnnnnnnnnnnnnnnnnnnnnnnnnnnnnnnnnnnnnnnnnnnnnnnnnnnnnnnnnnnnnnnnnnnnnnnnnnnnnnnnnnnnnnnnnnnnnnnnnnnnnnnnnnnnnnnnnnnnnnnnnnnnnnnnnnnnnnnnnnnnnnnnnnnnnnnnnnnnnnnnnnnnnnnnnnnnnnnnnnnnnnnnnnnnnnnnnnnnnnnnnnnnnnnnnnnnnnnnnnnnnnnnnnnnnnnnnnnnnnnnnnnnnnnnnnnnnnnnnnnnnnnnnnnnnnnnnnnnnnnnnnnnnnnnnnnnnnnnnnnnnnnnnnnnnnnnnnnnnnnnnnnnnnnnnnnnnnnnnnnnnnnnnnnnnnnnnnnnnnnnnnnnnnnnnnnnnnnnnnnnnnnnnnnnnnnnnnnnnnnnnnnnnnnnnnnnnnnnnnnnnnnnnnnnnnnnnnnnnnnnnnnnnnnnnnnnnnnnnnnnnnnnnnnnnnnnnnnnnnnnnnnnnnnnnnnnnnnnnnnnnnnnnnnnnnnnnnnnnnnnnnnnnnnnnnnnnnnnnnnnnnnnnnnnnnnnnnnnnnnnnnnnnnnnnnnnnnnnnnnnnnnnnnnnnnnnnnnnnnnnnnnnnnnnnnnnnnnnnnnnnnnnnnnnnnnnnnnnnnnnnnnnnnnnnnnnnnnnnnnnnnnnnnnnnnnnnnnnnnnnnnnnnnnnnnnnnnnnnnnnnnnnnnnnnnnnnnnnnnnnnnnnnnnnnnnnnnnnnnnnnnnnnnnnnnnnnnnnnnnnnnnnnnnnnnnnnnnnnnnnnnnnnnnnnnnnnnnnnnnnnnnnnnnnnnnnnnnnnnnnnnnnnnnnnnnnnnnnnnnnnnnnnnnnnnnnnnnnnnnnnnnnnnnnnnnnnnnnnnnnnnnnnnnnnnnnnnnnnnnnnnnnnnnnnnnnnnnnnnnnnnnnnnnnnnnnnnnnnnnnnnnnnnnnnnnnnnnnnnnnnnnnnnnnnnnnnnnnnnnnnnnnnnnnnnnnnnnnnnnnnnnnnnnnnnnnnnnnnnnnnnnnnnnnnnnnnnnnnnnnnnnnnnnnnnnnnnnnnnnnnnnnnnnnnnnnnnnnnnnnnnnnnnnnnnnnnnnnnnnnnnnnnnnnnnnnnnnnnnnnnnnnnnnnnnnnnnnnnnnnnnnnnnnnnnnnnnnnnnnnnnnnnnnnnnnnnnnnnnnnnnnnnnnnnnnnnnnnnnnnnnnnnnnnnnnnnnnnnnnnnnnnnnnnnnnnnnnnnnnnnnnnnnnnnnnnnnnnnnnnnnnnnnnnnnnnnnnnnnnnnnnnnnnnnnnnnnnnnnnnnnnnnnnnnnnnnnnnnnnnnnnnnnnnnnnnnnnnnnnnnnnnnnnnnnnnnnnnnnnnnnnnnnnnnnnnnnnnnnnnnnnnnnnnnnnnnnnnnnnnnnnnnnnnnnnnnnnnnnnnnnnnnnnnnnnnnnnnnnnnnnnnnnnnnnnnnnnnnnnnnnnnnnnnnnnnnnnnnnnnnnnnnnnnnnnnnnnnnnnnnnnnnnnnnnnnnnnnnnnnnnnnnnnnnnnnnnnnnnnnnnnnnnnnnnnnnnnnnnnnnnnnnnnnnnnnnnnnnnnnnnnnnnnnnnnnnnnnnnnnnnnnnnnnnnnnnnnnnnnnnnnnnnnnnnnnnnnnnnnnnnnnnnnnnnnnnnnnnnnnnnnnnnnnnnnnnnnnnnnnnnnnnnnnnnnnnnnnnnnnnnnnnnnnnnnnnnnnnnnnnnnnnnnnnnnnnnnnnnnnnnnnnnnnnnnnnnnnnnnnnnnnnnnnnnnnnnnnnnnnnnnnnnnnnnnnnnnnnnnnnnnnnnnnnnnnnnnnnnnnnnnnnnnnnnnnnnnnnnnnnnnnnnnnnnnnnnnnnnnnnnnnnnnnnnnnnnnnnnnnnnnnnnnnnnnnnnnnnnnnnnnnnnnnnnnnnnnnnnnnnnnnnnnnnnnnnnnnnnnnnnnnnnnnnnnnnnnnnnnnnnnnnnnnnnnnnnnnnnnnnnnnnnnnnnnnnnnnnnnnnnnnnnnnnnnnnnnnnnnnnnnnnnnnnnnnnnnnnnnnnnnnnnnnnnnnnnnnnnnnnnnnnnnnnnnnnnnnnnnnnnnnnnnnnnnnnnnnnnnnnnnnnnnnnnnnnnnnnnnnnnnnnnnnnnnnnnnnnnnnnnnnnnnnnnnnnnnnnnnnnnnnnnnnnnnnnnnnnnnnnnnnnnnnnnnnnnnnnnnnnnnnnnnnnnnnnnnnnnnnnnnnnnnnnnnnnnnnnnnnnnnnnnnnnnnnnnnnnnnnnnnnnnnnnnnnnnnnnnnnnnnnnnnnnnnnnnnnnnnnnnnnnnnnnnnnnnnnnnnnnnnnnnnnnnnnnnnnnnnnnnnnnnnnnnnnnnnnnnnnnnnnnnnnnnnnnnnnnnnnnnnnnnnnnnnnnnnnnnnnnnnnnnnnnnnnnnnnnnnnnnnnnnnnnnnnnnnnnnnnnnnnnnnnnnnnnnnnnnnnnnnnnnnnnnnnnnnnnnnnnnnnnnnnnnnnnnnnnnnnnnnnnnnnnnnnnnnnnnnnnnnnnnnnnnnnnnnnnnnnnnnnnnnnnnnnnnnnnnnnnnnnnnnnnnnnnnnnnnnnnnnnnnnnnnnnnnnnnnnnnnnnnnnnnnnnnnnnnnnnnnnnnnnnnnnnnnnnnnnnnnnnnnnnnnnnnnnnnnnnnnnnnnnnnnnnnnnnnnnnnnnnnnnnnnnnnnnnnnnnnnnnnnnnnnnnnnnnnnnnnnnnnnnnnnnnnnnnnnnnnnnnnnnnnnnnnnnnnnnnnnnnnnnnnnnnnnnnnnnnnnnnnnnnnnnnnnnnnnnnnnnnnnnnnnnnnnnnnnnnnnnnnnnnnnnnnnnnnnnnnnnnnnnnnnnnnnnnnnnnnnnnnnnnnnnnnnnnnnnnnnnnnnnnnnnnnnnnnnnnnnnnnnnnnnnnnnnnnnnnnnnnnnnnnnnnnnnnnnnnnnnnnnnnnnnnnnnnnnnnnnnnnnnnnnnnnnnnnnnnnnnnnnnnnnnnnnnnnnnnnnnnnnnnnnnnnnnnnnnnnnnnnnnnnnnnnnnnnnnnnnnnnnnnnnnnnnnnnnnnnnnnnnnnnnnnnnnnnnnnnnnnnnnnnnnnnnnnnnnnnnnnnnnnnnnnnnnnnnnnnnnnnnnnnnnnnnnnnnnnnnnnnnnnnnnnnnnnnnnnnnnnnnnnnnnnnnnnnnnnnnnnnnnnnnnnnnnnnnnnnnnnnnnnnnnnnnnnnnnnnnnnnnnnnnnnnnnnnnnnnnnnnnnnnnnnnnnnnnnnnnnnnnnnnnnnnnnnnnnnnnnnnnnnnnnnnnnnnnnnnnnnnnnnnnnnnnnnnnnnnnnnnnnnnnnnnnnnnnnnnnnnnnnnnnnnnnnnnnnnnnnnnnnnnnnnnnnnnnnnnnnnnnnnnnnnnnnnnnnnnnnnnnnnnnnnnnnnnnnnnnnnnnnnnnnnnnnnnnnnnnnnnnnnnnnnnnnnnnnnnnnnnnnnnnnnnnnnnnnnnnnnnnnnnnnnnnnnnnnnnnnnnnnnnnnnnnnnnnnnnnnnnnnnnnnnnnnnnnnnnnnnnnnnnnnnnnnnnnnnnnnnnnnnnnnnnnnnnnnnnnnnnnnnnnnnnnnnnnnnnnnnnnnnnnnnnnnnnnnnnnnnnnnnnnnnnnnnnnnnnnnnnnnnnnnnnnnnnnnnnnnnnnnnnnnnnnnnnnnnnnnnnnnnnnnnnnnnnnnnnnnnnnnnnnnnnnnnnnnnnnnnnnnnnnnnnnnnnnnnnnnnnnnnnnnnnnnnnnnnnnnnnnnnnnnnnnnnnnnnnnnnnnnnnnnnnnnnnnnnnnnnnnnnnnnnnnnnnnnnnnnnnnnnnnnnnnnnnnnnnnnnnnnnnnnnnnnnnnnnnnnnnnnnnnnnnnnnnnnnnnnnnnnnnnnnnnnnnnnnnnnnnnnnnnnnnnnnnnnnnnnnnnnnnnnnnnnnnnnnnnnnnnnnnnnnnnnnnnnnnnnnnnnnnnnnnnnnnnnnnnnnnnnnnnnnnnnnnnnnnnnnnnnnnnnnnnnnnnnnnnnnnnnnnnnnnnnnnnnnnnnnnnnnnnnnnnnnnnnnnnnnnnnnnnnnnnnnnnnnnnnnnnnnnnnnnnnnnnnnnnnnnnnnnnnnnnnnnnnnnnnnnnnnnnnnnnnnnnnnnnnnnnnnnnnnnnnnnnnnnnnnnnnnnnnnnnnnnnnnnnnnnnnnnnnnnnnnnnnnnnnnnnnnnnnnnnnnnnnnnnnnnnnnnnnnnnnnnnnnnnnnnnnnnnnnnnnnnnnnnnnnnnnnnnnnnnnnnnnnnnnnnnnnnnnnnnnnnnnnnnnnnnnnnnnnnnnnnnnnnnnnnnnnnnnnnnnnnnnnnnnnnnnnnnnnnnnnnnnnnnnnnnnnnnnnnnnnnnnnnnnnnnnnnnnnnnnnnnnnnnnnnnnnnnnnnnnnnnnnnnnnnnnnnnnnnnnnnnnnnnnnnnnnnnnnnnnnnnnnnnnnnnnnnnnnnnnnnnnnnnnnnnnnnnnnnnnnnnnnnnnnnnnnnnnnnnnnnnnnnnnnnnnnnnnnnnnnnnnnnnnnnnnnnnnnnnnnnnnnnnnnnnnnnnnnnnnnnnnnnnnnnnnnnnnnnnnnnnnnnnnnnnnnnnnnnnnnnnnnnnnnnnnnnnnnnnnnnnnnnnnnnnnnnnnnnnnnnnnnnnnnnnnnnnnnnnnnnnnnnnnnnnnnnnnnnnnnnnnnnnnnnnnnnnnnnnnnnnnnnnnnnnnnnnnnnnnnnnnnnnnnnnnnnnnnnnnnnnnnnnnnnnnnnnnnnnnnnnnnnnnnnnnnnnnnnnnnnnnnnnnnnnnnnnnnnnnnnnnnnnnnnnnnnnnnnnnnnnnnnnnnnnnnnnnnnnnnnnnnnnnnnnnnnnnnnnnnnnnnnnnnnnnnnnnnnnnnnnnnnnnnnnnnnnnnnnnnnnnnnnnnnnnnnnnnnnnnnnnnnnnnnnnnnnnnnnnnnnnnnnnnnnnnnnnnnnnnnnnnnnnnnnnnnnnnnnnnnnnnnnnnnnnnnnnnnnnnnnnnnnnnnnnnnnnnnnnnnnnnnnnnnnnnnnnnnnnnnnnnnnnnnnnnnnnnnnnnnnnnnnnnnnnnnnnnnnnnnnnnnnnnnnnnnnnnnnnnnnnnnnnnnnnnnnnnnnnnnnnnnnnnnnnnnnnnnnnnnnnnnnnnnnnnnnnnnnnnnnnnnnnnnnnnnnnnnnnnnnnnnnnnnnnnnnnnnnnnnnnnnnnnnnnnnnnnnnnnnnnnnnnnnnnnnnnnnnnnnnnnnnnnnnnnnnnnnnnnnnnnnnnnnnnnnnnnnnnnnnnnnnnnnnnnnnnnnnnnnnnnnnnnnnnnnnnnnnnnnnnnnnnnnnnnnnnnnnnnnnnnnnnnnnnnnnnnnnnnnnnnnnnnnnnnnnnnnnnnnnnnnnnnnnnnnnnnnnnnnnnnnnnnnnnnnnnnnnnnnnnnnnnnnnnnnnnnnnnnnnnnnnnnnnnnnnnnnnnnnnnnnnnnnnnnnnnnnnnnnnnnnnnnnnnnnnnnnnnnnnnnnnnnnnnnnnnnnnnnnnnnnnnnnnnnnnnnnnnnnnnnnnnnnnnnnnnnnnnnnnnnnnnnnnnnnnnnnnnnnnnnnnnnnnnnnnnnnnnnnnnnnnnnnnnnnnnnnnnnnnnnnnnnnnnnnnnnnnnnnnnnnnnnnnnnnnnnnnnnnnnnnnnnnnnnnnnnnnnnnnnnnnnnnnnnnnnnnnnnnnnnnnnnnnnnnnnnnnnnnnnnnnnnnnnnnnnnnnnnnnnnnnnnnnnnnnnnnnnnnnnnnnnnnnnnnnnnnnnnnnnnnnnnnnnnnnnnnnnnnnnnnnnnnnnnnnnnnnnnnnnnnnnnnnnnnnnnnnnnnnnnnnnnnnnnnnnnnnnnnnnnnnnnnnnnnnnnnnnnnnnnnnnnnnnnnnnnnnnnnnnnnnnnnnnnnnnnnnnnnnnnnnnnnnnnnnnnnnnnnnnnnnnnnnnnnnnnnnnnnnnnnnnnnnnnnnnnnnnnnnnnnnnnnnnnnnnnnnnnnnnnnnnnnnnnnnnnnnnnnnnnnnnnnnnnnnnnnnnnnnnnnnnnnnnnnnnnnnnnnnnnnnnnnnnnnnnnnnnnnnnnnnnnnnnnnnnnnnnnnnnnnnnnnnnnnnnnnnnnnnnnnnnnnnnnnnnnnnnnnnnnnnnnnnnnnnnnnnnnnnnnnnnnnnnnnnnnnnnnnnnnnnnnnnnnnnnnnnnnnnnnnnnnnnnnnnnnnnnnnnnnnnnnnnnnnnnnnnnnnnnnnnnnnnnnnnnnnnnnnnnnnnnnnnnnnnnnnnnnnnnnnnnnnnnnnnnnnnnnnnnnnnnnnnnnnnnnnnnnnnnnnnnnnnnnnnnnnnnnnnnnnnnnnnnnnnnnnnnnnnnnnnnnnnnnnnnnnnnnnnnnnnnnnnnnnnnnnnnnnnnnnnnnnnnnnnnnnnnnnnnnnnnnnnnnnnnnnnnnnnnnnnnnnnnnnnnnnnnnnnnnnnnnnnnnnnnnnnnnnnnnnnnnnnnnnnnnnnnnnnnnnnnnnnnnnnnnnnnnnnnnnnnnnnnnnnnnnnnnnnnnnnnnnnnnnnnnnnnnnnnnnnnnnnnnnnnnnnnnnnnnnnnnnnnnnnnnnnnnnnnnnnnnnnnnnnnnnnnnnnnnnnnnnnnnnnnnnnnnnnnnnnnnnnnnnnnnnnnnnnnnnnnnnnnnnnnnnnnnnnnnnnnnnnnnnnnnnnnnnnnnnnnnnnnnnnnnnnnnnnnnnnnnnnnnnnnnnnnnnnnnnnnnnnnnnnnnnnnnnnnnnnnnnnnnnnnnnnnnnnnnnnnnnnnnnnnnnnnnnnnnnnnnnnnnnnnnnnnnnnnnnnnnnnnnnnnnnnnnnnnnnnnnnnnnnnnnnnnnnnnnnnnnnnnnnnnnnnnnnnnnnnnnnnnnnnnnnnnnnnnnnnnnnnnnnnnnnnnnnnnnnnnnnnnnnnnnnnnnnnnnnnnnnnnnnnnnnnnnnnnnnnnnnnnnnnnnnnnnnnnnnnnnnnnnnnnnnnnnnnnnnnnnnnnnnnnnnnnnnnnnnnnnnnnnnnnnnnnnnnnnnnnnnnnnnnnnnnnnnnnnnnnnnnnnnnnnnnnnnnnnnnnnnnnnnnnnnnnnnnnnnnnnnnnnnnnnnnnnnnnnnnnnnnnnnnnnnnnnnnnnnnnnnnnnnnnnnnnnnnnnnnnnnnnnnnnnnnnnnnnnnnnnnnnnnnnnnnnnnnnnnnnnnnnnnnnnnnnnnnnnnnnnnnnnnnnnnnnnnnnnnnnnnnnnnnnnnnnnnnnnnnnnnnnnnnnnnnnnnnnnnnnnnnnnnnnnnnnnnnnnnnnnnnnnnnnnnnnnnnnnnnnnnnnnnnnnnnnnnnnnnnnnnnnnnnnnnnnnnnnnnnnnnnnnnnnnnnnnnnnnnnnnnnnnnnnnnnnnnnnnnnnnnnnnnnnnnnnnnnnnnnnnnnnnnnnnnnnnnnnnnnnnnnnnnnnnnnnnnnnnnnnnnnnnnnnnnnnnnnnnnnnnnnnnnnnnnnnnnnnnnnnnnnnnnnnnnnnnnnnnnnnnnnnnnnnnnnnnnnnnnnnnnnnnnnnnnnnnnnnnnnnnnnnnnnnnnnnnnnnnnnnnnnnnnnnnnnnnnnnnnnnnnnnnnnnnnnnnnnnnnnnnnnnnnnnnnnnnnnnnnnnnnnnnnnnnnnnnnnnnnnnnnnnnnnnnnnnnnnnnnnnnnnnnnnnnnnnnnnnnnnnnnnnnnnnnnnnnnnnnnnnnnnnnnnnnnnnnnnnnnnnnnnnnnnnnnnnnnnnnnnnnnnnnnnnnnnnnnnnnnnnnnnnnnnnnnnnnnnnnnnnnnnnnnnnnnnnnnnnnnnnnnnnnnnnnnnnnnnnnnnnnnnnnnnnnnnnnnnnnnnnnnnnnnnnnnnnnnnnnnnnnnnnnnnnnnnnnnnnnnnnnnnnnnnnnnnnnnnnnnnnnnnnnnnnnnnnnnnnnnnnnnnnnnnnnnnnnnnnnnnnnnnnnnnnnnnnnnnnnnnnnnnnnnnnnnnnnnnnnnnnnnnnnnnnnnnnnnnnnnnnnnnnnnnnnnnnnnnnnnnnnnnnnnnnnnnnnnnnnnnnnnnnnnnnnnnnnnnnnnnnnnnnnnnnnnnnnnnnnnnnnnnnnnnnnnnnnnnnnnnnnnnnnnnnnnnnnnnnnnnnnnnnnnnnnnnnnnnnnnnnnnnnnnnnnnnnnnnnnnnnnnnnnnnnnnnnnnnnnnnnnnnnnnnnnnnnnnnnnnnnnnnnnnnnnnnnnnnnnnnnnnnnnnnnnnnnnnnnnnnnnnnnnnnnnnnnnnnnnnnnnnnnnnnnnnnnnnnnnnnnnnnnnnnnnnnnnnnnnnnnnnnnnnnnnnnnnnnnnnnnnnnnnnnnnnnnnnnnnnnnnnnnnnnnnnnnnnnnnnnnnnnnnnnnnnnnnnnnnnnnnnnnnnnnnnnnnnnnnnnnnnnnnnnnnnnnnnnnnnnnnnnnnnnnnnnnnnnnnnnnnnnnnnnnnnnnnnnnnnnnnnnnnnnnnnnnnnnnnnnnnnnnnnnnnnnnnnnnnnnnnnnnnnnnnnnnnnnnnnnnnnnnnnnnnnnnnnnnnnnnnnnnnnnnnnnnnnnnnnnnnnnnnnnnnnnnnnnnnnnnnnnnnnnnnnnnnnnnnnnnnnnnnnnnnnnnnnnnnnnnnnnnnnnnnnnnnnnnnnnnnnnnnnnnnnnnnnnnnnnnnnnnnnnnnnnnnnnnnnnnnnnnnnnnnnnnnnnnnnnnnnnnnnnnnnnnnnnnnnnnnnnnnnnnnnnnnnnnnnnnnnnnnnnnnnnnnnnnnnnnnnnnnnnnnnnnnnnnnnnnnnnnnnnnnnnnnnnnnnnnnnnnnnnnnnnnnnnnnnnnnnnnnnnnnnnnnnnnnnnnnnnnnnnnnnnnnnnnnnnnnnnnnnnnnnnnnnnnnnnnnnnnnnnnnnnnnnnnnnnnnnnnnnnnnnnnnnnnnnnnnnnnnnnnnnnnnnnnnnnnnnnnnnnnnnnnnnnnnnnnnnnnnnnnnnnnnnnnnnnnnnnnnnnnnnnnnnnnnnnnnnnnnnnnnnnnnnnnnnnnnnnnnnnnnnnnnnnnnnnnnnnnnnnnnnnnnnnnnnnnnnnnnnnnnnnnnnnnnnnnnnnnnnnnnnnnnnnnnnnnnnnnnnnnnnnnnnnnnnnnnnnnnnnnnnnnnnnnnnnnnnnnnnnnnnnnnnnnnnnnnnnnnnnnnnnnnnnnnnnnnnnnnnnnnnnnnnnnnnnnnnnnnnnnnnnnnnnnnnnnnnnnnnnnnnnnnnnnnnnnnnnnnnnnnnnnnnnnnnnnnnnnnnnnnnnnnnnnnnnnnnnnnnnnnnnnnnnnnnnnnnnnnnnnnnnnnnnnnnnnnnnnnnnnnnnnnnnnnnnnnnnnnnnnnnnnnnnnnnnnnnnnnnnnnnnnnnnnnnnnnnnnnnnnnnnnnnnnnnnnnnnnnnnnnnnnnnnnnnnnnnnnnnnnnnnnnnnnnnnnnnnnnnnnnnnnnnnnnnnnnnnnnnnnnnnnnnnnnnnnnnnnnnnnnnnnnnnnnnnnnnnnnnnnnnnnnnnnnnnnnnnnnnnnnnnnnnnnnnnnnnnnnnnnnnnnnnnnnnnnnnnnnnnnnnnnnnnnnnnnnnnnnnnnnnnnnnnnnnnnnnnnnnnnnnnnnnnnnnnnnnnnnnnnnnnnnnnnnnnnnnnnnnnnnnnnnnnnnnnnnnnnnnnnnnnnnnnnnnnnnnnnnnnnnnnnnnnnnnnnnnnnnnnnnnnnnnnnnnnnnnnnnnnnnnnnnnnnnnnnnnnnnnnnnnnnnnnnnnnnnnnnnnnnnnnnnnnnnnnnnnnnnnnnnnnnnnnnnnnnnnnnnnnnnnnnnnnnnnnnnnnnnnnnnnnnnnnnnnnnnnnnnnnnnnnnnnnnnnnnnnnnnnnnnnnnnnnnnnnnnnnnnnnnnnnnnnnnnnnnnnnnnnnnnnnnnnnnnnnnnnnnnnnnnnnnnnnnnnnnnnnnnnnnnnnnnnnnnnnnnnnnnnnnnnnnnnnnnnnnnnnnnnnnnnnnnnnnnnnnnnnnnnnnnnnnnnnnnnnnnnnnnnnnnnnnnnnnnnnnnnnnnnnnnnnnnnnnnnnnnnnnnnnnnnnnnnnnnnnnnnnnnnnnnnnnnnnnnnnnnnnnnnnnnnnnnnnnnnnnnnnnnnnnnnnnnnnnnnnnnnnnnnnnnnnnnnnnnnnnnnnnnnnnnnnnnnnnnnnnnnnnnnnnnnnnnnnnnnnnnnnnnnnnnnnnnnnnnnnnnnnnnnnnnnnnnnnnnnnnnnnnnnnnnnnnnnnnnnnnnnnnnnnnnnnnnnnnnnnnnnnnnnnnnnnnnnnnnnnnnnnnnnnnnnnnnnnnnnnnnnnnnnnnnnnnnnnnnnnnnnnnnnnnnnnnnnnnnnnnnnnnnnnnnnnnnnnnnnnnnnnnnnnnnnnnnnnnnnnnnnnnnnnnnnnnnnnnnnnnnnnnnnnnnnnnnnnnnnnnnnnnnnnnnnnnnnnnnnnnnnnnnnnnnnnnnnnnnnnnnnnnnnnnnnnnnnnnnnnnnnnnnnnnnnnnnnnnnnnnnnnnnnnnnnnnnnnnnnnnnnnnnnnnnnnnnnnnnnnnnnnnnnnnnnnnnnnnnnnnnnnnnnnnnnnnnnnnnnnnnnnnnnnnnnnnnnnnnnnnnnnnnnnnnnnnnnnnnnnnnnnnnnnnnnnnnnnnnnnnnnnnnnnnnnnnnnnnnnnnnnnnnnnnnnnnnnnnnnnnnnnnnnnnnnnnnnnnnnnnnnnnnnnnnnnnnnnnnnnnnnnnnnnnnnnnnnnnnnnnnnnnnnnnnnnnnnnnnnnnnnnnnnnnnnnnnnnnnnnnnnnnnnnnnnnnnnnnnnnnnnnnnnnnnnnnnnnnnnnnnnnnnnnnnnnnnnnnnnnnnnnnnnnnnnnnnnnnnnnnnnnnnnnnnnnnnnnnnnnnnnnnnnnnnnnnnnnnnnnnnnnnnnnnnnnnnnnnnnnnnnnnnnnnnnnnnnnnnnnnnnnnnnnnnnnnnnnnnnnnnnnnnnnnnnnnnnnnnnnnnnnnnnnnnnnnnnnnnnnnnnnnnnnnnnnnnnnnnnnnnnnnnnnnnnnnnnnnnnnnnnnnnnnnnnnnnnnnnnnnnnnnnnnnnnnnnnnnnnnnnnnnnnnnnnnnnnnnnnnnnnnnnnnnnnnnnnnnnnnnnnnnnnnnnnnnnnnnnnnnnnnnnnnnnnnnnnnnnnnnnnnnnnnnnnnnnnnnnnnnnnnnnnnnnnnnnnnnnnnnnnnnnnnnnnnnnnnnnnnnnnnnnnnnnnnnnnnnnnnnnnnnnnnnnnnnnnnnnnnnnnnnnnnnnnnnnnnnnnnnnnnnnnnnnnnnnnnnnnnnnnnnnnnnnnnnnnnnnnnnnnnnnnnnnnnnnnnnnnnnnnnnnnnnnnnnnnnnnnnnnnnnnnnnnnnnnnnnnnnnnnnnnnnnnnnnnnnnnnnnnnnnnnnnnnnnnnnnnnnnnnnnnnnnnnnnnnnnnnnnnnnnnnnnnnnnnnnnnnnnnnnnnnnnnnnnnnnnnnnnnnnnnnnnnnnnnnnnnnnnnnnnnnnnnnnnnnnnnnnnnnnnnnnnnnnnnnnnnnnnnnnnnnnnnnnnnnnnnnnnnnnnnnnnnnnnnnnnnnnnnnnnnnnnnnnnnnnnnnnnnnnnnnnnnnnnnnnnnnnnnnnnnnnnnnnnnnnnnnnnnnnnnnnnnnnnnnnnnnnnnnnnnnnnnnnnnnnnnnnnnnnnnnnnnnnnnnnnnnnnnnnnnnnnnnnnnnnnnnnnnnnnnnnnnnnnnnnnnnnnnnnnnnnnnnnnnnnnnnnnnnnnnnnnnnnnnnnnnnnnnnnnnnnnnnnnnnnnnnnnnnnnnnnnnnnnnnnnnnnnnnnnnnnnnnnnnnnnnnnnnnnnnnnnnnnnnnnnnnnnnnnnnnnnnnnnnnnnnnnnnnnnnnnnnnnnnnnnnnnnnnnnnnnnnnnnnnnnnnnnnnnnnnnnnnnnnnnnnnnnnnnnnnnnnnnnnnnnnnnnnnnnnnnnnnnnnnnnnnnnnnnnnnnnnnnnnnnnnnnnnnnnnnnnnnnnnnnnnnnnnnnnnnnnnnnnnnnnnnnnnnnnnnnnnnnnnnnnnnnnnnnnnnnnnnnnnnnnnnnnnnnnnnnnnnnnnnnnnnnnnnnnnnnnnnnnnnnnnnnnnnnnnnnnnnnnnnnnnnnnnnnnnnnnnnnnnnnnnnnnnnnnnnnnnnnnnnnnnnnnnnnnnnnnnnnnnnnnnnnnnnnnnnnnnnnnnnnnnnnnnnnnnnnnnnnnnnnnnnnnnnnnnnnnnnnnnnnnnnnnnnnnnnnnnnnnnnnnnnnnnnnnnnnnnnnnnnnnnnnnnnnnnnnnnnnnnnnnnnnnnnnnnnnnnnnnnnnnnnnnnnnnnnnnnnnnnnnnnnnnnnnnnnnnnnnnnnnnnnnnnnnnnnnnnnnnnnnnnnnnnnnnnnnnnnnnnnnnnnnnnnnnnnnnnnnnnnnnnnnnnnnnnnnnnnnnnnnnnnnnnnnnnnnnnnnnnnnnnnnnnnnnnnnnnnnnnnnnnnnnnnnnnnnnnnnnnnnnnnnnnnnnnnnnnnnnnnnnnnnnnnnnnnnnnnnnnnnnnnnnnnnnnnnnnnnnnnnnnnnnnnnnnnnnnnnnnnnnnnnnnnnnnnnnnnnnnnnnnnnnnnnnnnnnnnnnnnnnnnnnnnnnnnnnnnnnnnnnnnnnnnnnnnnnnnnnnnnnnnnnnnnnnnnnnnnnnnnnnnnnnnnnnnnnnnnnnnnnnnnnnnnnnnnnnnnnnnnnnnnnnnnnnnnnnnnnnnnnnnnnnnnnnnnnnnnnnnnnnnnnnnnnnnnnnnnnnnnnnnnnnnnnnnnnnnnnnnnnnnnnnnnnnnnnnnnnnnnnnnnnnnnnnnnnnnnnnnnnnnnnnnnnnnnnnnnnnnnnnnnnnnnnnnnnnnnnnnnnnnnnnnnnnnnnnnnnnnnnnnnnnnnnnnnnnnnnnnnnnnnnnnnnnnnnnnnnnnnnnnnnnnnnnnnnnnnnnnnnnnnnnnnnnnnnnnnnnnnnnnnnnnnnnnnnnnnnnnnnnnnnnnnnnnnnnnnnnnnnnnnnnnnnnnnnnnnnnnnnnnnnnnnnnnnnnnnnnnnnnnnnnnnnnnnnnnnnnnnnnnnnnnnnnnnnnnnnnnnnnnnnnnnnnnnnnnnnnnnnnnnnnnnnnnnnnnnnnnnnnnnnnnnnnnnnnnnnnnnnnnnnnnnnnnnnnnnnnnnnnnnnnnnnnnnnnnnnnnnnnnnnnnnnnnnnnnnnnnnnnnnnnnnnnnnnnnnnnnnnnnnnnnnnnnnnnnnnnnnnnnnnnnnnnnnnnnnnnnnnnnnnnnnnnnnnnnnnnnnnnnnnnnnnnnnnnnnnnnnnnnnnnnnnnnnnnnnnnnnnnnnnnnnnnnnnnnnnnnnnnnnnnnnnnnnnnnnnnnnnnnnnnnnnnnnnnnnnnnnnnnnnnnnnnnnnnnnnnnnnnnnnnnnnnnnnnnnnnnnnnnnnnnnnnnnnnnnnnnnnnnnnnnnnnnnnnnnnnnnnnnnnnnnnnnnnnnnnnnnnnnnnnnnnnnnnnnnnnnnnnnnnnnnnnnnnnnnnnnnnnnnnnnnnnnnnnnnnnnnnnnnnnnnnnnnnnnnnnnnnnnnnnnnnnnnnnnnnnnnnnnnnnnnnnnnnnnnnnnnnnnnnnnnnnnnnnnnnnnnnnnnnnnnnnnnnnnnnnnnnnnnnnnnnnnnnnnnnnnnnnnnnnnnnnnnnnnnnnnnnnnnnnnnnnnnnnnnnnnnnnnnnnnnnnnnnnnnnnnnnnnnnnnnnnnnnnnnnnnnnnnnnnnnnnnnnnnnnnnnnnnnnnnnnnnnnnnnnnnnnnnnnnnnnnnnnnnnnnnnnnnnnnnnnnnnnnnnnnnnnnnnnnnnnnnnnnnnnnnnnnnnnnnnnnnnnnnnnnnnnnnnnnnnnnnnnnnnnnnnnnnnnnnnnnnnnnnnnnnnnnnnnnnnnnnnnnnnnnnnnnnnnnnnnnnnnnnnnnnnnnnnnnnnnnnnnnnnnnnnnnnnnnnnnnnnnnnnnnnnnnnnnnnnnnnnnnnnnnnnnnnnnnnnnnnnnnnnnnnnnnnnnnnnnnnnnnnnnnnnnnnnnnnnnnnnnnnnnnnnnnnnnnnnnnnnnnnnnnnnnnnnnnnnnnnnnnnnnnnnnnnnnnnnnnnnnnnnnnnnnnnnnnnnnnnnnnnnnnnnnnnnnnnnnnnnnnnnnnnnnnnnnnnnnnnnnnnnnnnnnnnnnnnnnnnnnnnnnnnnnnnnnnnnnnnnnnnnnnnnnnnnnnnnnnnnnnnnnnnnnnnnnnnnnnnnnnnnnnnnnnnnnnnnnnnnnnnnnnnnnnnnnnnnnnnnnnnnnnnnnnnnnnnnnnnnnnnnnnnnnnnnnnnnnnnnnnnnnnnnnnnnnnnnnnnnnnnnnnnnnnnnnnnnnnnnnnnnnnnnnnnnnnnnnnnnnnnnnnnnnnnnnnnnnnnnnnnnnnnnnnnnnnnnnnnnnnnnnnnnnnnnnnnnnnnnnnnnnnnnnnnnnnnnnnnnnnnnnnnnnnnnnnnnnnnnnnnnnnnnnnnnnnnnnnnnnnnnnnnnnnnnnnnnnnnnnnnnnnnnnnnnnnnnnnnnnnnnnnnnnnnnnnnnnnnnnnnnnnnnnnnnnnnnnnnnnnnnnnnnnnnnnnnnnnnnnnnnnnnnnnnnnnnnnnnnnnnnnnnnnnnnnnnnnnnnnnnnnnnnnnnnnnnnnnnnnnnnnnnnnnnnnnnnnnnnnnnnnnnnnnnnnnnnnnnnnnnnnnnnnnnnnnnnnnnnnnnnnnnnnnnnnnnnnnnnnnnnnnnnnnnnnnnnnnnnnnnnnnnnnnnnnnnnnnnnnnnnnnnnnnnnnnnnnnnnnnnnnnnnnnnnnnnnnnnnnnnnnnnnnnnnnnnnnnnnnnnnnnnnnnnnnnnnnnnnnnnnnnnnnnnnnnnnnnnnnnnnnnnnnnnnnnnnnnnnnnnnnnnnnnnnnnnnnnnnnnnnnnnnnnnnnnnnnnnnnnnnnnnnnnnnnnnnnnnnnnnnnnnnnnnnnnnnnnnnnnnnnnnnnnnnnnnnnnnnnnnnnnnnnnnnnnnnnnnnnnnnnnnnnnnnnnnnnnnnnnnnnnnnnnnnnnnnnnnnnnnnnnnnnnnnnnnnnnnnnnnnnnnnnnnnnnnnnnnnnnnnnnnnnnnnnnnnnnnnnnnnnnnnnnnnnnnnnnnnnnnnnnnnnnnnnnnnnnnnnnnnnnnnnnnnnnnnnnnnnnnnnnnnnnnnnnnnnnnnnnnnnnnnnnnnnnnnnnnnnnnnnnnnnnnnnnnnnnnnnnnnnnnnnnnnnnnnnnnnnnnnnnnnnnnnnnnnnnnnnnnnnnnnnnnnnnnnnnnnnnnnnnnnnnnnnnnnnnnnnnnnnnnnnnnnnnnnnnnnnnnnnnnnnnnnnnnnnnnnnnnnnnnnnnnnnnnnnnnnnnnnnnnnnnnnnnnnnnnnnnnnnnnnnnnnnnnnnnnnnnnnnnnnnnnnnnnnnnnnnnnnnnnnnnnnnnnnnnnnnnnnnnnnnnnnnnnnnnnnnnnnnnnnnnnnnnnnnnnnnnnnnnnnnnnnnnnnnnnnnnnnnnnnnnnnnnnnnnnnnnnnnnnnnnnnnnnnnnnnnnnnnnnnnnnnnnnnnnnnnnnnnnnnnnnnnnnnnnnnnnnnnnnnnnnnnnnnnnnnnnnnnnnnnnnnnnnnnnnnnnnnnnnnnnnnnnnnnnnnnnnnnnnnnnnnnnnnnnnnnnnnnnnnnnnnnnnnnnnnnnnnnnnnnnnnnnnnnnnnnnnnnnnnnnnnnnnnnnnnnnnnnnnnnnnnnnnnnnnnnnnnnnnnnnnnnnnnnnnnnnnnnnnnnnnnnnnnnnnnnnnnnnnnnnnnnnnnnnnnnnnnnnnnnnnnnnnnnnnnnnnnnnnnnnnnnnnnnnnnnnnnnnnnnnnnnnnnnnnnnnnnnnnnnnnnnnnnnnnnnnnnnnnnnnnnnnnnnnnnnnnnnnnnnnnnnnnnnnnnnnnnnnnnnnnnnnnnnnnnnnnnnnnnnnnnnnnnnnnnnnnnnnnnnnnnnnnnnnnnnnnnnnnnnnnnnnnnnnnnnnnnnnnnnnnnnnnnnnnnnnnnnnnnnnnnnnnnnnnnnnnnnnnnnnnnnnnnnnnnnnnnnnnnnnnnnnnnnnnnnnnnnnnnnnnnnnnnnnnnnnnnnnnnnnnnnnnnnnnnnnnnnnnnnnnnnnnnnnnnnnnnnnnnnnnnnnnnnnnnnnnnnnnnnnnnnnnnnnnnnnnnnnnnnnnnnnnnnnnnnnnnnnnnnnnnnnnnnnnnnnnnnnnnnnnnnnnnnnnnnnnnnnnnnnnnnnnnnnnnnnnnnnnnnnnnnnnnnnnnnnnnnnnnnnnnnnnnnnnnnnnnnnnnnnnnnnnnnnnnnnnnnnnnnnnnnnnnnnnnnnnnnnnnnnnnnnnnnnnnnnnnnnnnnnnnnnnnnnnnnnnnnnnnnnnnnnnnnnnnnnnnnnnnnnnnnnnnnnnnnnnnnnnnnnnnnnnnnnnnnnnnnnnnnnnnnnnnnnnnnnnnnnnnnnnnnnnnnnnnnnnnnnnnnnnnnnnnnnnnnnnnnnnnnnnnnnnnnnnnnnnnnnnnnnnnnnnnnnnnnnnnnnnnnnnnnnnnnnnnnnnnnnnnnnnnnnnnnnnnnnnnnnnnnnnnnnnnnnnnnnnnnnnnnnnnnnnnnnnnnnnnnnnnnnnnnnnnnnnnnnnnnnnnnnnnnnnnnnnnnnnnnnnnnnnnnnnnnnnnnnnnnnnnnnnnnnnnnnnnnnnnnnnnnnnnnnnnnnnnnnnnnnnnnnnnnnnnnnnnnnnnnnnnnnnnnnnnnnnnnnnnnnnnnnnnnnnnnnnnnnnnnnnnnnnnnnnnnnnnnnnnnnnnnnnnnnnnnnnnnnnnnnnnnnnnnnnnnnnnnnnnnnnnnnnnnnnnnnnnnnnnnnnnnnnnnnnnnnnnnnnnnnnnnnnnnnnnnnnnnnnnnnnnnnnnnnnnnnnnnnnnnnnnnnnnnnnnnnnnnnnnnnnnnnnnnnnnnnnnnnnnnnnnnnnnnnnnnnnnnnnnnnnnnnnnnnnnnnnnnnnnnnnnnnnnnnnnnnnnnnnnnnnnnnnnnnnnnnnnnnnnnnnnnnnnnnnnnnnnnnnnnnnnnnnnnnnnnnnnnnnnnnnnnnnnnnnnnnnnnnnnnnnnnnnnnnnnnnnnnnnnnnnnnnnnnnnnnnnnnnnnnnnnnnnnnnnnnnnnnnnnnnnnnnnnnnnnnnnnnnnnnnnnnnnnnnnnnnnnnnnnnnnnnnnnnnnnnnnnnnnnnnnnnnnnnnnnnnnnnnnnnnnnnnnnnnnnnnnnnnnnnnnnnnnnnnnnnnnnnnnnnnnnnnnnnnnnnnnnnnnnnnnnnnnnnnnnnnnnnnnnnnnnnnnnnnnnnnnnnnnnnnnnnnnnnnnnnnnnnnnnnnnnnnnnnnnnnnnnnnnnnnnnnnnnnnnnnnnnnnnnnnnnnnnnnnnnnnnnnnnnnnnnnnnnnnnnnnnnnnnnnnnnnnnnnnnnnnnnnnnnnnnnnnnnnnnnnnnnnnnnnnnnnnnnnnnnnnnnnnnnnnnnnnnnnnnnnnnnnnnnnnnnnnnnnnnnnnnnnnnnnnnnnnnnnnnnnnnnnnnnnnnnnnnnnnnnnnnnnnnnnnnnnnnnnnnnnnnnnnnnnnnnnnnnnnnnnnnnnnnnnnnnnnnnnnnnnnnnnnnnnnnnnnnnnnnnnnnnnnnnnnnnnnnnnnnnnnnnnnnnnnnnnnnnnnnnnnnnnnnnnnnnnnnnnnnnnnnnnnnnnnnnnnnnnnnnnnnnnnnnnnnnnnnnnnnnnnnnnnnnnnnnnnnnnnnnnnnnnnnnnnnnnnnnnnnnnnnnnnnnnnnnnnnnnnnnnnnnnnnnnnnnnnnnnnnnnnnnnnnnnnnnnnnnnnnnnnnnnnnnnnnnnnnnnnnnnnnnnnnnnnnnnnnnnnnnnnnnnnnnnnnnnnnnnnnnnnnnnnnnnnnnnnnnnnnnnnnnnnnnnnnnnnnnnnnnnnnnnnnnnnnnnnnnnnnnnnnnnnnnnnnnnnnnnnnnnnnnnnnnnnnnnnnnnnnnnnnnnnnnnnnnnnnnnnnnnnnnnnnnnnnnnnnnnnnnnnnnnnnnnnnnnnnnnnnnnnnnnnnnnnnnnnnnnnnnnnnnnnnnnnnnnnnnnnnnnnnnnnnnnnnnnnnnnnnnnnnnnnnnnnnnnnnnnnnnnnnnnnnnnnnnnnnnnnnnnnnnnnnnnnnnnnnnnnnnnnnnnnnnnnnnnnnnnnnnnnnnnnnnnnnnnnnnnnnnnnnnnnnnnnnnnnnnnnnnnnnnnnnnnnnnnnnnnnnnnnnnnnnnnnnnnnnnnnnnnnnnnnnnnnnnnnnnnnnnnnnnnnnnnnnnnnnnnnnnnnnnnnnnnnnnnnnnnnnnnnnnnnnnnnnnnnnnnnnnnnnnnnnnnnnnnnnnnnnnnnnnnnnnnnnnnnnnnnnnnnnnnnnnnnnnnnnnnnnnnnnnnnnnnnnnnnnnnnnnnnnnnnnnnnnnnnnnnnnnnnnnnnnnnnnnnnnnnnnnnnnnnnnnnnnnnnnnnnnnnnnnnnnnnnnnnnnnnnnnnnnnnnnnnnnnnnnnnnnnnnnnnnnnnnnnnnnnnnnnnnnnnnnnnnnnnnnnnnnnnnnnnnnnnnnnnnnnnnnnnnnnnnnnnnnnnnnnnnnnnnnnnnnnnnnnnnnnnnnnnnnnnnnnnnnnnnnnnnnnnnnnnnnnnnnnnnnnnnnnnnnnnnnnnnnnnnnnnnnnnnnnnnnnnnnnnnnnnnnnnnnnnnnnnnnnnnnnnnnnnnnnnnnnnnnnnnnnnnnnnnnnnnnnnnnnnnnnnnnnnnnnnnnnnnnnnnnnnnnnnnnnnnnnnnnnnnnnnnnnnnnnnnnnnnnnnnnnnnnnnnnnnnnnnnnnnnnnnnnnnnnnnnnnnnnnnnnnnnnnnnnnnnnnnnnnnnnnnnnnnnnnnnnnnnnnnnnnnnnnnnnnnnnnnnnnnnnnnnnnnnnnnnnnnnnnnnnnnnnnnnnnnnnnnnnnnnnnnnnnnnnnnnnnnnnnnnnnnnnnnnnnnnnnnnnnnnnnnnnnnnnnnnnnnnnnnnnnnnnnnnnnnnnnnnnnnnnnnnnnnnnnnnnnnnnnnnnnnnnnnnnnnnnnnnnnnnnnnnnnnnnnnnnnnnnnnnnnnnnnnnnnnnnnnnnnnnnnnnnnnnnnnnnnnnnnnnnnnnnnnnnnnnnnnnnnnnnnnnnnnnnnnnnnnnnnnnnnnnnnnnnnnnnnnnnnnnnnnnnnnnnnnnnnnnnnnnnnnnnnnnnnnnnnnnnnnnnnnnnnnnnnnnnnnnnnnnnnnnnnnnnnnnnnnnnnnnnnnnnnnnnnnnnnnnnnnnnnnnnnnnnnnnnnnnnnnnnnnnnnnnnnnnnnnnnnnnnnnnnnnnnnnnnnnnnnnnnnnnnnnnnnnnnnnnnnnnnnnnnnnnnnnnnnnnnnnnnnnnnnnnnnnnnnnnnnnnnnnnnnnnnnnnnnnnnnnnnnnnnnnnnnnnnnnnnnnnnnnnnnnnnnnnnnnnnnnnnnnnnnnnnnnnnnnnnnnnnnnnnnnnnnnnnnnnnnnnnnnnnnnnnnnnnnnnnnnnnnnnnnnnnnnnnnnnnnnnnnnnnnnnnnnnnnnnnnnnnnnnnnnnnnnnnnnnnnnnnnnnnnnnnnnnnnnnnnnnnnnnnnnnnnnnnnnnnnnnnnnnnnnnnnnnnnnnnnnnnnnnnnnnnnnnnnnnnnnnnnnnnnnnnnnnnnnnnnnnnnnnnnnnnnnnnnnnnnnnnnnnnnnnnnnnnnnnnnnnnnnnnnnnnnnnnnnnnnnnnnnnnnnnnnnnnnnnnnnnnnnnnnnnnnnnnnnnnnnnnnnnnnnnnnnnnnnnnnnnnnnnnnnnnnnnnnnnnnnnnnnnnnnnnnnnnnnnnnnnnnnnnnnnnnnnnnnnnnnnnnnnnnnnnnnnnnnnnnnnnnnnnnnnnnnnnnnnnnnnnnnnnnnnnnnnnnnnnnnnnnnnnnnnnnnnnnnnnnnnnnnnnnnnnnnnnnnnnnnnnnnnnnnnnnnnnnnnnnnnnnnnnnnnnnnnnnnnnnnnnnnnnnnnnnnnnnnnnnnnnnnnnnnnnnnnnnnnnnnnnnnnnnnnnnnnnnnnnnnnnnnnnnnnnnnnnnnnnnnnnnnnnnnnnnnnnnnnnnnnnnnnnnnnnnnnnnnnnnnnnnnnnnnnnnnnnnnnnnnnnnnnnnnnnnnnnnnnnnnnnnnnnnnnnnnnnnnnnnnnnnnnnnnnnnnnnnnnnnnnnnnnnnnnnnnnnnnnnnnnnnnnnnnnnnnnnnnnnnnnnnnnnnnnnnnnnnnnnnnnnnnnnnnnnnnnnnnnnnnnnnnnnnnnnnnnnnnnnnnnnnnnnnnnnnnnnnnnnnnnnnnnnnnnnnnnnnnnnnnnnnnnnnnnnnnnnnnnnnnnnnnnnnnnnnnnnnnnnnnnnnnnnnnnnnnnnnnnnnnnnnnnnnnnnnnnnnnnnnnnnnnnnnnnnnnnnnnnnnnnnnnnnnnnnnnnnnnnnnnnnnnnnnnnnnnnnnnnnnnnnnnnnnnnnnnnnnnnnnnnnnnnnnnnnnnnnnnnnnnnnnnnnnnnnnnnnnnnnnnnnnnnnnnnnnnnnnnnnnnnnnnnnnnnnnnnnnnnnnnnnnnnnnnnnnnnnnnnnnnnnnnnnnnnnnnnnnnnnnnnnnnnnnnnnnnnnnnnnnnnnnnnnnnnnnnnnnnnnnnnnnnnnnnnnnnnnnnnnnnnnnnnnnnnnnnnnnnnnnnnnnnnnnnnnnnnnnnnnnnnnnnnnnnnnnnnnnnnnnnnnnnnnnnnnnnnnnnnnnnnnnnnnnnnnnnnnnnnnnnnnnnnnnnnnnnnnnnnnnnnnnnnnnnnnnnnnnnnnnnnnnnnnnnnnnnnnnnnnnnnnnnnnnnnnnnnnnnnnnnnnnnnnnnnnnnnnnnnnnnnnnnnnnnnnnnnnnnnnnnnnnnnnnnnnnnnnnnnnnnnnnnnnnnnnnnnnnnnnnnnnnnnnnnnnnnnnnnnnnnnnnnnnnnnnnnnnnnnnnnnnnnnnnnnnnnnnnnnnnnnnnnnnnnnnnnnnnnnnnnnnnnnnnnnnnnnnnnnnnnnnnnnnnnnnnnnnnnnnnnnnnnnnnnnnnnnnnnnnnnnnnnnnnnnnnnnnnnnnnnnnnnnnnnnnnnnnnnnnnnnnnnnnnnnnnnnnnnnnnnnnnnnnnnnnnnnnnnnnnnnnnnnnnnnnnnnnnnnnnnnnnnnnnnnnnnnnnnnnnnnnnnnnnnnnnnnnnnnnnnnnnnnnnnnnnnnnnnnnnnnnnnnnnnnnnnnnnnnnnnnnnnnnnnnnnnnnnnnnnnnnnnnnnnnnnnnnnnnnnnnnnnnnnnnnnnnnnnnnnnnnnnnnnnnnnnnnnnnnnnnnnnnnnnnnnnnnnnnnnnnnnnnnnnnnnnnnnnnnnnnnnnnnnnnnnnnnnnnnnnnnnnnnnnnnnnnnnnnnnnnnnnnnnnnnnnnnnnnnnnnnnnnnnnnnnnnnnnnnnnnnnnnnnnnnnnnnnnnnnnnnnnnnnnnnnnnnnnnnnnnnnnnnnnnnnnnnnnnnnnnnnnnnnnnnnnnnnnnnnnnnnnnnnnnnnnnnnnnnnnnnnnnnnnnnnnnnnnnnnnnnnnnnnnnnnnnnnnnnnnnnnnnnnnnnnnnnnnnnnnnnnnnnnnnnnnnnnnnnnnnnnnnnnnnnnnnnnnnnnnnnnnnnnnnnnnnnnnnnnnnnnnnnnnnnnnnnnnnnnnnnnnnnnnnnnnnnnnnnnnnnnnnnnnnnnnnnnnnnnnnnnnnnnnnnnnnnnnnnnnnnnnnnnnnnnnnnnnnnnnnnnnnnnnnnnnnnnnnnnnnnnnnnnnnnnnnnnnnnnnnnnnnnnnnnnnnnnnnnnnnnnnnnnnnnnnnnnnnnnnnnnnnnnnnnnnnnnnnnnnnnnnnnnnnnnnnnnnnnnnnnnnnnnnnnnnnnnnnnnnnnnnnnnnnnnnnnnnnnnnnnnnnnnnnnnnnnnnnnnnnnnnnnnnnnnnnnnnnnnnnnnnnnnnnnnnnnnnnnnnnnnnnnnnnnnnnnnnnnnnnnnnnnnnnnnnnnnnnnnnnnnnnnnnnnnnnnnnnnnnnnnnnnnnnnnnnnnnnnnnnnnnnnnnnnnnnnnnnnnnnnnnnnnnnnnnnnnnnnnnnnnnnnnnnnnnnnnnnnnnnnnnnnnnnnnnnnnnnnnnnnnnnnnnnnnnnnnnnnnnnnnnnnnnnnnnnnnnnnnnnnnnnnnnnnnnnnnnnnnnnnnnnnnnnnnnnnnnnnnnnnnnnnnnnnnnnnnnnnnnnnnnnnnnnnnnnnnnnnnnnnnnnnnnnnnnnnnnnnnnnnnnnnnnnnnnnnnnnnnnnnnnnnnnnnnnnnnnnnnnnnnnnnnnnnnnnnnnnnnnnnnnnnnnnnnnnnnnnnnnnnnnnnnnnnnnnnnnnnnnnnnnnnnnnnnnnnnnnnnnnnnnnnnnnnnnnnnnnnnnnnnnnnnnnnnnnnnnnnnnnnnnnnnnnnnnnnnnnnnnnnnnnnnnnnnnnnnnnnnnnnnnnnnnnnnnnnnnnnnnnnnnnnnnnnnnnnnnnnnnnnnnnnnnnnnnnnnnnnnnnnnnnnnnnnnnnnnnnnnnnnnnnnnnnnnnnnnnnnnnnnnnnnnnnnnnnnnnnnnnnnnnnnnnnnnnnnnnnnnnnnnnnnnnnnnnnnnnnnnnnnnnnnnnnnnnnnnnnnnnnnnnnnnnnnnnnnnnnnnnnnnnnnnnnnnnnnnnnnnnnnnnnnnnnnnnnnnnnnnnnnnnnnnnnnnnnnnnnnnnnnnnnnnnnnnnnnnnnnnnnnnnnnnnnnnnnnnnnnnnnnnnnnnnnnnnnnnnnnnnnnnnnnnnnnnnnnnnnnnnnnnnnnnnnnnnnnnnnnnnnnnnnnnnnnnnnnnnnnnnnnnnnnnnnnnnnnnnnnnnnnnnnnnnnnnnnnnnnnnnnnnnnnnnnnnnnnnnnnnnnnnnnnnnnnnnnnnnnnnnnnnnnnnnnnnnnnnnnnnnnnnnnnnnnnnnnnnnnnnnnnnnnnnnnnnnnnnnnnnnnnnnnnnnnnnnnnnnnnnnnnnnnnnnnnnnnnnnnnnnnnnnnnnnnnnnnnnnnnnnnnnnnnnnnnnnnnnnnnnnnnnnnnnnnnnnnnnnnnnnnnnnnnnnnnnnnnnnnnnnnnnnnnnnnnnnnnnnnnnnnnnnnnnnnnnnnnnnnnnnnnnnnnnnnnnnnnnnnnnnnnnnnnnnnnnnnnnnnnnnnnnnnnnnnnnnnnnnnnnnnnnnnnnnnnnnnnnnnnnnnnnnnnnnnnnnnnnnnnnnnnnnnnnnnnnnnnnnnnnnnnnnnnnnnnnnnnnnnnnnnnnnnnnnnnnnnnnnnnnnnnnnnnnnnnnnnnnnnnnnnnnnnnnnnnnnnnnnnnnnnnnnnnnnnnnnnnnnnnnnnnnnnnnnnnnnnnnnnnnnnnnnnnnnnnnnnnnnnnnnnnnnnnnnnnnnnnnnnnnnnnnnnnnnnnnnnnnnnnnnnnnnnnnnnnnnnnnnnnnnnnnnnnnnnnnnnnnnnnnnnnnnnnnnnnnnnnnnnnnnnnnnnnnnnnnnnnnnnnnnnnnnnnnnnnnnnnnnnnnnnnnnnnnnnnnnnnnnnnnnnnnnnnnnnnnnnnnnnnnnnnnnnnnnnnnnnnnnnnnnnnnnnnnnnnnnnnnnnnnnnnnnnnnnnnnnnnnnnnnnnnnnnnnnnnnnnnnnnnnnnnnnnnnnnnnnnnnnnnnnnnnnnnnnnnnnnnnnnnnnnnnnnnnnnnnnnnnnnnnnnnnnnnnnnnnnnnnnnnnnnnnnnnnnnnnnnnnnnnnnnnnnnnnnnnnnnnnnnnnnnnnnnnnnnnnnnnnnnnnnnnnnnnnnnnnnnnnnnnnnnnnnnnnnnnnnnnnnnnnnnnnnnnnnnnnnnnnnnnnnnnnnnnnnnnnnnnnnnnnnnnnnnnnnnnnnnnnnnnnnnnnnnnnnnnnnnnnnnnnnnnnnnnnnnnnnnnnnnnnnnnnnnnnnnnnnnnnnnnnnnnnnnnnnnnnnnnnnnnnnnnnnnnnnnnnnnnnnnnnnnnnnnnnnnnnnnnnnnnnnnnnnnnnnnnnnnnnnnnnnnnnnnnnnnnnnnnnnnnnnnnnnnnnnnnnnnnnnnnnnnnnnnnnnnnnnnnnnnnnnnnnnnnnnnnnnnnnnnnnnnnnnnnnnnnnnnnnnnnnnnnnnnnnnnnnnnnnnnnnnnnnnnnnnnnnnnnnnnnnnnnnnnnnnnnnnnnnnnnnnnnnnnnnnnnnnnnnnnnnnnnnnnnnnnnnnnnnnnnnnnnnnnnnnnnnnnnnnnnnnnnnnnnnnnnnnnnnnnnnnnnnnnnnnnnnnnnnnnnnnnnnnnnnnnnnnnnnnnnnnnnnnnnnnnnnnnnnnnnnnnnnnnnnnnnnnnnnnnnnnnnnnnnnnnnnnnnnnnnnnnnnnnnnnnnnnnnnnnnnnnnnnnnnnnnnnnnnnnnnnnnnnnnnnnnnnnnnnnnnnnnnnnnnnnnnnnnnnnnnnnnnnnnnnnnnnnnnnnnnnnnnnnnnnnnnnnnnnnnnnnnnnnnnnnnnnnnnnnnnnnnnnnnnnnnnnnnnnnnnnnnnnnnnnnnnnnnnnnnnnnnnnnnnnnnnnnnnnnnnnnnnnnnnnnnnnnnnnnnnnnnnnnnnnnnnnnnnnnnnnnnnnnnnnnnnnnnnnnnnnnnnnnnnnnnnnnnnnnnnnnnnnnnnnnnnnnnnnnnnnnnnnnnnnnnnnnnnnnnnnnnnnnnnnnnnnnnnnnnnnnnnnnnnnnnnnnnnnnnnnnnnnnnnnnnnnnnnnnnnnnnnnnnnnnnnnnnnnnnnnnnnnnnnnnnnnnnnnnnnnnnnnnnnnnnnnnnnnnnnnnnnnnnnnnnnnnnnnnnnnnnnnnnnnnnnnnnnnnnnnnnnnnnnnnnnnnnnnnnnnnnnnnnnnnnnnnnnnnnnnnnnnnnnnnnnnnnnnnnnnnnnnnnnnnnnnnnnnnnnnnnnnnnnnnnnnnnnnnnnnnnnnnnnnnnnnnnnnnnnnnnnnnnnnnnnnnnnnnnnnnnnnnnnnnnnnnnnnnnnnnnnnnnnnnnnnnnnnnnnnnnnnnnnnnnnnnnnnnnnnnnnnnnnnnnnnnnnnnnnnnnnnnnnnnnnnnnnnnnnnnnnnnnnnnnnnnnnnnnnnnnnnnnnnnnnnnnnnnnnnnnnnnnnnnnnnnnnnnnnnnnnnnnnnnnnnnnnnnnnnnnnnnnnnnnnnnnnnnnnnnnnnnnnnnnnnnnnnnnnnnnnnnnnnnnnnnnnnnnnnnnnnnnnnnnnnnnnnnnnnnnnnnnnnnnnnnnnnnnnnnnnnnnnnnnnnnnnnnnnnnnnnnnnnnnnnnnnnnnnnnnnnnnnnnnnnnnnnnnnnnnnnnnnnnnnnnnnnnnnnnnnnnnnnnnnnnnnnnnnnnnnnnnnnnnnnnnnnnnnnnnnnnnnnnnnnnnnnnnnnnnnnnnnnnnnnnnnnnnnnnnnnnnnnnnnnnnnnnnnnnnnnnnnnnnnnnnnnnnnnnnnnnnnnnnnnnnnnnnnnnnnnnnnnnnnnnnnnnnnnnnnnnnnnnnnnnnnnnnnnnnnnnnnnnnnnnnnnnnnnnnnnnnnnnnnnnnnnnnnnnnnnnnnnnnnnnnnnnnnnnnnnnnnnnnnnnnnnnnnnnnnnnnnnnnnnnnnnnnnnnnnnnnnnnnnnnnnnnnnnnnnnnnnnnnnnnnnnnnnnnnnnnnnnnnnnnnnnnnnnnnnnnnnnnnnnnnnnnnnnnnnnnnnnnnnnnnnnnnnnnnnnnnnnnnnnnnnnnnnnnnnnnnnnnnnnnnnnnnnnnnnnnnnnnnnnnnnnnnnnnnnnnnnnnnnnnnnnnnnnnnnnnnnnnnnnnnnnnnnnnnnnnnnnnnnnnnnnnnnnnnnnnnnnnnnnnnnnnnnnnnnnnnnnnnnnnnnnnnnnnnnnnnnnnnnnnnnnnnnnnnnnnnnnnnnnnnnnnnnnnnnnnnnnnnnnnnnnnnnnnnnnnnnnnnnnnnnnnnnnnnnnnnnnnnnnnnnnnnnnnnnnnnnnnnnnnnnnnnnnnnnnnnnnnnnnnnnnnnnnnnnnnnnnnnnnnnnnnnnnnnnnnnnnnnnnnnnnnnnnnnnnnnnnnnnnnnnnnnnnnnnnnnnnnnnnnnnnnnnnnnnnnnnnnnnnnnnnnnnnnnnnnnnnnnnnnnnnnnnnnnnnnnnnnnnnnnnnnnnnnnnnnnnnnnnnnnnnnnnnnnnnnnnnnnnnnnnnnnnnnnnnnnnnnnnnnnnnnnnnnnnnnnnnnnnnnnnnnnnnnnnnnnnnnnnnnnnnnnnnnnnnnnnnnnnnnnnnnnnnnnnnnnnnnnnnnnnnnnnnnnnnnnnnnnnnnnnnnnnnnnnnnnnnnnnnnnnnnnnnnnnnnnnnnnnnnnnnnnnnnnnnnnnnnnnnnnnnnnnnnnnnnnnnnnnnnnnnnnnnnnnnnnnnnnnnnnnnnnnnnnnnnnnnnnnnnnnnnnnnnnnnnnnnnnnnnnnnnnnnnnnnnnnnnnnnnnnnnnnnnnnnnnnnnnnnnnnnnnnnnnnnnnnnnnnnnnnnnnnnnnnnnnnnnnnnnnnnnnnnnnnnnnnnnnnnnnnnnnnnnnnnnnnnnnnnnnnnnnnnnnnnnnnnnnnnnnnnnnnnnnnnnnnnnnnnnnnnnnnnnnnnnnnnnnnnnnnnnnnnnnnnnnnnnnnnnnnnnnnnnnnnnnnnnnnnnnnnnnnnnnnnnnnnnnnnnnnnnnnnnnnnnnnnnnnnnnnnnnnnnnnnnnnnnnnnnnnnnnnnnnnnnnnnnnnnnnnnnnnnnnnnnnnnnnnnnnnnnnnnnnnnnnnnnnnnnnnnnnnnnnnnnnnnnnnnnnnnnnnnnnnnnnnnnnnnnnnnnnnnnnnnnnnnnnnnnnnnnnnnnnnnnnnnnnnnnnnnnnnnnnnnnnnnnnnnnnnnnnnnnnnnnnnnnnnnnnnnnnnnnnnnnnnnnnnnnnnnnnnnnnnnnnnnnnnnnnnnnnnnnnnnnnnnnnnnnnnnnnnnnnnnnnnnnnnnnnnnnnnnnnnnnnnnnnnnnnnnnnnnnnnnnnnnnnnnnnnnnnnnnnnnnnnnnnnnnnnnnnnnnnnnnnnnnnnnnnnnnnnnnnnnnnnnnnnnnnnnnnnnnnnnnnnnnnnnnnnnnnnnnnnnnnnnnnnnnnnnnnnnnnnnnnnnnnnnnnnnnnnnnnnnnnnnnnnnnnnnnnnnnnnnnnnnnnnnnnnnnnnnnnnnnnnnnnnnnnnnnnnnnnnnnnnnnnnnnnnnnnnnnnnnnnnnnnnnnnnnnnnnnnnnnnnnnnnnnnnnnnnnnnnnnnnnnnnnnnnnnnnnnnnnnnnnnnnnnnnnnnnnnnnnnnnnnnnnnnnnnnnnnnnnnnnnnnnnnnnnnnnnnnnnnnnnnnnnnnnnnnnnnnnnnnnnnnnnnnnnnnnnnnnnnnnnnnnnnnnnnnnnnnnnnnnnnnnnnnnnnnnnnnnnnnnnnnnnnnnnnnnnnnnnnnnnnnnnnnnnnnnnnnnnnnnnnnnnnnnnnnnnnnnnnnnnnnnnnnnnnnnnnnnnnnnnnnnnnnnnnnnnnnnnnnnnnnnnnnnnnnnnnnnnnnnnnnnnnnnnnnnnnnnnnnnnnnnnnnnnnnnnnnnnnnnnnnnnnnnnnnnnnnnnnnnnnnnnnnnnnnnnnnnnnnnnnnnnnnnnnnnnnnnnnnnnnnnnnnnnnnnnnnnnnnnnnnnnnnnnnnnnnnnnnnnnnnnnnnnnnnnnnnnnnnnnnnnnnnnnnnnnnnnnnnnnnnnnnnnnnnnnnnnnnnnnnnnnnnnnnnnnnnnnnnnnnnnnnnnnnnnnnnnnnnnnnnnnnnnnnnnnnnnnnnnnnnnnnnnnnnnnnnnnnnnnnnnnnnnnnnnnnnnnnnnnnnnnnnnnnnnnnnnnnnnnnnnnnnnnnnnnnnnnnnnnnnnnnnnnnnnnnnnnnnnnnnnnnnnnnnnnnnnnnnnnnnnnnnnnnnnnnnnnnnnnnnnnnnnnnnnnnnnnnnnnnnnnnnnnnnnnnnnnnnnnnnnnnnnnnnnnnnnnnnnnnnnnnnnnnnnnnnnnnnnnnnnnnnnnnnnnnnnnnnnnnnnnnnnnnnnnnnnnnnnnnnnnnnnnnnnnnnnnnnnnnnnnnnnnnnnnnnnnnnnnnnnnnnnnnnnnnnnnnnnnnnnnnnnnnnnnnnnnnnnnnnnnnnnnnnnnnnnnnnnnnnnnnnnnnnnnnnnnnnnnnnnnnnnnnnnnnnnnnnnnnnnnnnnnnnnnnnnnnnnnnnnnnnnnnnnnnnnnnnnnnnnnnnnnnnnnnnnnnnnnnnnnnnnnnnnnnnnnnnnnnnnnnnnnnnnnnnnnnnnnnnnnnnnnnnnnnnnnnnnnnnnnnnnnnnnnnnnnnnnnnnnnnnnnnnnnnnnnnnnnnnnnnnnnnnnnnnnnnnnnnnnnnnnnnnnnnnnnnnnnnnnnnnnnnnnnnnnnnnnnnnnnnnnnnnnnnnnnnnnnnnnnnnnnnnnnnnnnnnnnnnnnnnnnnnnnnnnnnnnnnnnnnnnnnnnnnnnnnnnnnnnnnnnnnnnnnnnnnnnnnnnnnnnnnnnnnnnnnnnnnnnnnnnnnnnnnnnnnnnnnnnnnnnnnnnnnnnnnnnnnnnnnnnnnnnnnnnnnnnnnnnnnnnnnnnnnnnnnnnnnnnnnnnnnnnnnnnnnnnnnnnnnnnnnnnnnnnnnnnnnnnnnnnnnnnnnnnnnnnnnnnnnnnnnnnnnnnnnnnnnnnnnnnnnnnnnnnnnnnnnnnnnnnnnnnnnnnnnnnnnnnnnnnnnnnnnnnnnnnnnnnnnnnnnnnnnnnnnnnnnnnnnnnnnnnnnnnnnnnnnnnnnnnnnnnnnnnnnnnnnnnnnnnnnnnnnnnnnnnnnnnnnnnnnnnnnnnnnnnnnnnnnnnnnnnnnnnnnnnnnnnnnnnnnnnnnnnnnnnnnnnnnnnnnnnnnnnnnnnnnnnnnnnnnnnnnnnnnnnnnnnnnnnnnnnnnnnnnnnnnnnnnnnnnnnnnnnnnnnnnnnnnnnnnnnnnnnnnnnnnnnnnnnnnnnnnnnnnnnnnnnnnnnnnnnnnnnnnnnnnnnnnnnnnnnnnnnnnnnnnnnnnnnnnnnnnnnnnnnnnnnnnnnnnnnnnnnnnnnnnnnnnnnnnnnnnnnnnnnnnnnnnnnnnnnnnnnnnnnnnnnnnnnnnnnnnnnnnnnnnnnnnnnnnnnnnnnnnnnnnnnnnnnnnnnnnnnnnnnnnnnnnnnnnnnnnnnnnnnnnnnnnnnnnnnnnnnnnnnnnnnnnnnnnnnnnnnnnnnnnnnnnnnnnnnnnnnnnnnnnnnnnnnnnnnnnnnnnnnnnnnnnnnnnnnnnnnnnnnnnnnnnnnnnnnnnnnnnnnnnnnnnnnnnnnnnnnnnnnnnnnnnnnnnnnnnnnnnnnnnnnnnnnnnnnnnnnnnnnnnnnnnnnnnnnnnnnnnnnnnnnnnnnnnnnnnnnnnnnnnnnnnnnnnnnnnnnnnnnnnnnnnnnnnnnnnnnnnnnnnnnnnnnnnnnnnnnnnnnnnnnnnnnnnnnnnnnnnnnnnnnnnnnnnnnnnnnnnnnnnnnnnnnnnnnnnnnnnnnnnnnnnnnnnnnnnnnnnnnnnnnnnnnnnnnnnnnnnnnnnnnnnnnnnnnnnnnnnnnnnnnnnnnnnnnnnnnnnnnnnnnnnnnnnnnnnnnnnnnnnnnnnnnnnnnnnnnnnnnnnnnnnnnnnnnnnnnnnnnnnnnnnnnnnnnnnnnnnnnnnnnnnnnnnnnnnnnnnnnnnnnnnnnnnnnnnnnnnnnnnnnnnnnnnnnnnnnnnnnnnnnnnnnnnnnnnnnnnnnnnnnnnnnnnnnnnnnnnnnnnnnnnnnnnnnnnnnnnnnnnnnnnnnnnnnnnnnnnnnnnnnnnnnnnnnnnnnnnnnnnnnnnnnnnnnnnnnnnnnnnnnnnnnnnnnnnnnnnnnnnnnnnnnnnnnnnnnnnnnnnnnnnnnnnnnnnnnnnnnnnnnnnnnnnnnnnnnnnnnnnnnnnnnnnnnnnnnnnnnnnnnnnnnnnnnnnnnnnnnnnnnnnnnnnnnnnnnnnnnnnnnnnnnnnnnnnnnnnnnnnnnnnnnnnnnnnnnnnnnnnnnnnnnnnnnnnnnnnnnnnnnnnnnnnnnnnnnnnnnnnnnnnnnnnnnnnnnnnnnnnnnnnnnnnnnnnnnnnnnnnnnnnnnnnnnnnnnnnnnnnnnnnnnnnnnnnnnnnnnnnnnnnnnnnnnnnnnnnnnnnnnnnnnnnnnnnnnnnnnnnnnnnnnnnnnnnnnnnnnnnnnnnnnnnnnnnnnnnnnnnnnnnnnnnnnnnnnnnnnnnnnnnnnnnnnnnnnnnnnnnnnnnnnnnnnnnnnnnnnnnnnnnnnnnnnnnnnnnnnnnnnnnnnnnnnnnnnnnnnnnnnnnnnnnnnnnnnnnnnnnnnnnnnnnnnnnnnnnnnnnnnnnnnnnnnnnnnnnnnnnnnnnnnnnnnnnnnnnnnnnnnnnnnnnnnnnnnnnnnnnnnnnnnnnnnnnnnnnnnnnnnnnnnnnnnnnnnnnnnnnnnnnnnnnnnnnnnnnnnnnnnnnnnnnnnnnnnnnnnnnnnnnnnnnnnnnnnnnnnnnnnnnnnnnnnnnnnnnnnnnnnnnnnnnnnnnnnnnnnnnnnnnnnnnnnnnnnnnnnnnnnnnnnnnnnnnnnnnnnnnnnnnnnnnnnnnnnnnnnnnnnnnnnnnnnnnnnnnnnnnnnnnnnnnnnnnnnnnnnnnnnnnnnnnnnnnnnnnnnnnnnnnnnnnnnnnnnnnnnnnnnnnnnnnnnnnnnnnnnnnnnnnnnnnnnnnnnnnnnnnnnnnnnnnnnnnnnnnnnnnnnnnnnnnnnnnnnnnnnnnnnnnnnnnnnnnnnnnnnnnnnnnnnnnnnnnnnnnnnnnnnnnnnnnnnnnnnnnnnnnnnnnnnnnnnnnnnnnnnnnnnnnnnnnnnnnnnnnnnnnnnnnnnnnnnnnnnnnnnnnnnnnnnnnnnnnnnnnnnnnnnnnnnnnnnnnnnnnnnnnnnnnnnnnnnnnnnnnnnnnnnnnnnnnnnnnnnnnnnnnnnnnnnnnnnnnnnnnnnnnnnnnnnnnnnnnnnnnnnnnnnnnnnnnnnnnnnnnnnnnnnnnnnnnnnnnnnnnnnnnnnnnnnnnnnnnnnnnnnnnnnnnnnnnnnnnnnnnnnnnnnnnnnnnnnnnnnnnnnnnnnnnnnnnnnnnnnnnnnnnnnnnnnnnnnnnnnnnnnnnnnnnnnnnnnnnnnnnnnnnnnnnnnnnnnnnnnnnnnnnnnnnnnnnnnnnnnnnnnnnnnnnnnnnnnnnnnnnnnnnnnnnnnnnnnnnnnnnnnnnnnnnnnnnnnnnnnnnnnnnnnnnnnnnnnnnnnnnnnnnnnnnnnnnnnnnnnnnnnnnnnnnnnnnnnnnnnnnnnnnnnnnnnnnnnnnnnnnnnnnnnnnnnnnnnnnnnnnnnnnnnnnnnnnnnnnnnnnnnnnnnnnnnnnnnnnnnnnnnnnnnnnnnnnnnnnnnnnnnnnnnnnnnnnnnnnnnnnnnnnnnnnnnnnnnnnnnnnnnnnnnnnnnnnnnnnnnnnnnnnnnnnnnnnnnnnnnnnnnnnnnnnnnnnnnnnnnnnnnnnnnnnnnnnnnnnnnnnnnnnnnnnnnnnnnnnnnnnnnnnnnnnnnnnnnnnnnnnnnnnnnnnnnnnnnnnnnnnnnnnnnnnnnnnnnnnnnnnnnnnnnnnnnnnnnnnnnnnnnnnnnnnnnnnnnnnnnnnnnnnnnnnnnnnnnnnnnnnnnnnnnnnnnnnnnnnnnnnnnnnnnnnnnnnnnnnnnnnnnnnnnnnnnnnnnnnnnnnnnnnnnnnnnnnnnnnnnnnnnnnnnnnnnnnnnnnnnnnnnnnnnnnnnnnnnnnnnnnnnnnnnnnnnnnnnnnnnnnnnnnnnnnnnnnnnnnnnnnnnnnnnnnnnnnnnnnnnnnnnnnnnnnnnnnnnnnnnnnnnnnnnnnnnnnnnnnnnnnnnnnnnnnnnnnnnnnnnnnnnnnnnnnnnnnnnnnnnnnnnnnnnnnnnnnnnnnnnnnnnnnnnnnnnnnnnnnnnnnnnnnnnnnnnnnnnnnnnnnnnnnnnnnnnnnnnnnnnnnnnnnnnnnnnnnnnnnnnnnnnnnnnnnnnnnnnnnnnnnnnnnnnnnnnnnnnnnnnnnnnnnnnnnnnnnnnnnnnnnnnnnnnnnnnnnnnnnnnnnnnnnnnnnnnnnnnnnnnnnnnnnnnnnnnnnnnnnnnnnnnnnnnnnnnnnnnnnnnnnnnnnnnnnnnnnnnnnnnnnnnnnnnnnnnnnnnnnnnnnnnnnnnnnnnnnnnnnnnnnnnnnnnnnnnnnnnnnnnnnnnnnnnnnnnnnnnnnnnnnnnnnnnnnnnnnnnnnnnnnnnnnnnnnnnnnnnnnnnnnnnnnnnnnnnnnnnnnnnnnnnnnnnnnnnnnnnnnnnnnnnnnnnnnnnnnnnnnnnnnnnnnnnnnnnnnnnnnnnnnnnnnnnnnnnnnnnnnnnnnnnnnnnnnnnnnnnnnnnnnnnnnnnnnnnnnnnnnnnnnnnnnnnnnnnnnnnnnnnnnnnnnnnnnnnnnnnnnnnnnnnnnnnnnnnnnnnnnnnnnnnnnnnnnnnnnnnnnnnnnnnnnnnnnnnnnnnnnnnnnnnnnnnnnnnnnnnnnnnnnnnnnnnnnnnnnnnnnnnnnnnnnnnnnnnnnnnnnnnnnnnnnnnnnnnnnnnnnnnnnnnnnnnnnnnnnnnnnnnnnnnnnnnnnnnnnnnnnnnnnnnnnnnnnnnnnnnnnnnnnnnnnnnnnnnnnnnnnnnnnnnnnnnnnnnnnnnnnnnnnnnnnnnnnnnnnnnnnnnnnnnnnnnnnnnnnnnnnnnnnnnnnnnnnnnnnnnnnnnnnnnnnnnnnnnnnnnnnnnnnnnnnnnnnnnnnnnnnnnnnnnnnnnnnnnnnnnnnnnnnnnnnnnnnnnnnnnnnnnnnnnnnnnnnnnnnnnnnnnnnnnnnnnnnnnnnnnnnnnnnnnnnnnnnnnnnnnnnnnnnnnnnnnnnnnnnnnnnnnnnnnnnnnnnnnnnnnnnnnnnnnnnnnnnnnnnnnnnnnnnnnnnnnnnnnnnnnnnnnnnnnnnnnnnnnnnnnnnnnnnnnnnnnnnnnnnnnnnnnnnnnnnnnnnnnnnnnnnnnnnnnnnnnnnnnnnnnnnnnnnnnnnnnnnnnnnnnnnnnnnnnnnnnnnnnnnnnnnnnnnnnnnnnnnnnnnnnnnnnnnnnnnnnnnnnnnnnnnnnnnnnnnnnnnnnnnnnnnnnnnnnnnnnnnnnnnnnnnnnnnnnnnnnnnnnnnnnnnnnnnnnnnnnnnnnnnnnnnnnnnnnnnnnnnnnnnnnnnnnnnnnnnnnnnnnnnnnnnnnnnnnnnnnnnnnnnnnnnnnnnnnnnnnnnnnnnnnnnnnnnnnnnnnnnnnnnnnnnnnnnnnnnnnnnnnnnnnnnnnnnnnnnnnnnnnnnnnnnnnnnnnnnnnnnnnnnnnnnnnnnnnnnnnnnnnnnnnnnnnnnnnnnnnnnnnnnnnnnnnnnnnnnnnnnnnnnnnnnnnnnnnnnnnnnnnnnnnnnnnnnnnnnnnnnnnnnnnnnnnnnnnnnnnnnnnnnnnnnnnnnnnnnnnnnnnnnnnnnnnnnnnnnnnnnnnnnnnnnnnnnnnnnnnnnnnnnnnnnnnnnnnnnnnnnnnnnnnnnnnnnnnnnnnnnnnnnnnnnnnnnnnnnnnnnnnnnnnnnnnnnnnnnnnnnnnnnnnnnnnnnnnnnnnnnnnnnnnnnnnnnnnnnnnnnnnnnnnnnnnnnnnnnnnnnnnnnnnnnnnnnnnnnnnnnnnnnnnnnnnnnnnnnnnnnnnnnnnnnnnnnnnnnnnnnnnnnnnnnnnnnnnnnnnnnnnnnnnnnnnnnnnnnnnnnnnnnnnnnnnnnnnnnnnnnnnnnnnnnnnnnnnnnnnnnnnnnnnnnnnnnnnnnnnnnnnnnnnnnnnnnnnnnnnnnnnnnnnnnnnnnnnnnnnnnnnnnnnnnnnnnnnnnnnnnnnnnnnnnnnnnnnnnnnnnnnnnnnnnnnnnnnnnnnnnnnnnnnnnnnnnnnnnnnnnnnnnnnnnnnnnnnnnnnnnnnnnnnnnnnnnnnnnnnnnnnnnnnnnnnnnnnnnnnnnnnnnnnnnnnnnnnnnnnnnnnnnnnnnnnnnnnnnnnnnnnnnnnnnnnnnnnnnnnnnnnnnnnnnnnnnnnnnnnnnnnnnnnnnnnnnnnnnnnnnnnnnnnnnnnnnnnnnnnnnnnnnnnnnnnnnnnnnnnnnnnnnnnnnnnnnnnnnnnnnnnnnnnnnnnnnnnnnnnnnnnnnnnnnnnnnnnnnnnnnnnnnnnnnnnnnnnnnnnnnnnnnnnnnnnnnnnnnnnnnnnnnnnnnnnnnnnnnnnnnnnnnnnnnnnnnnnnnnnnnnnnnnnnnnnnnnnnnnnnnnnnnnnnnnnnnnnnnnnnnnnnnnnnnnnnnnnnnnnnnnnnnnnnnnnnnnnnnnnnnnnnnnnnnnnnnnnnnnnnnnnnnnnnnnnnnnnnnnnnnnnnnnnnnnnnnnnnnnnnnnnnnnnnnnnnnnnnnnnnnnnnnnnnnnnnnnnnnnnnnnnnnnnnnnnnnnnnnnnnnnnnnnnnnnnnnnnnnnnnnnnnnnnnnnnnnnnnnnnnnnnnnnnnnnnnnnnnnnnnnnnnnnnnnnnnnnnnnnnnnnnnnnnnnnnnnnnnnnnnnnnnnnnnnnnnnnnnnnnnnnnnnnnnnnnnnnnnnnnnnnnnnnnnnnnnnnnnnnnnnnnnnnnnnnnnnnnnnnnnnnnnnnnnnnnnnnnnnnnnnnnnnnnnnnnnnnnnnnnnnnnnnnnnnnnnnnnnnnnnnnnnnnnnnnnnnnnnnnnnnnnnnnnnnnnnnnnnnnnnnnnnnnnnnnnnnnnnnnnnnnnnnnnnnnnnnnnnnnnnnnnnnnnnnnnnnnnnnnnnnnnnnnnnnnnnnnnnnnnnnnnnnnnnnnnnnnnnnnnnnnnnnnnnnnnnnnnnnnnnnnnnnnnnnnnnnnnnnnnnnnnnnnnnnnnnnnnnnnnnnnnnnnnnnnnnnnnnnnnnnnnnnnnnnnnnnnnnnnnnnnnnnnnnnnnnnnnnnnnnnnnnnnnnnnnnnnnnnnnnnnnnnnnnnnnnnnnnnnnnnnnnnnnnnnnnnnnnnnnnnnnnnnnnnnnnnnnnnnnnnnnnnnnnnnnnnnnnnnnnnnnnnnnnnnnnnnnnnnnnnnnnnnnnnnnnnnnnnnnnnnnnnnnnnnnnnnnnnnnnnnnnnnnnnnnnnnnnnnnnnnnnnnnnnnnnnnnnnnnnnnnnnnnnnnnnnnnnnnnnnnnnnnnnnnnnnnnnnnnnnnnnnnnnnnnnnnnnnnnnnnnnnnnnnnnnnnnnnnnnnnnnnnnnnnnnnnnnnnnnnnnnnnnnnnnnnnnnnnnnnnnnnnnnnnnnnnnnnnnnnnnnnnnnnnnnnnnnnnnnnnnnnnnnnnnnnnnnnnnnnnnnnnnnnnnnnnnnnnnnnnnnnnnnnnnnnnnnnnnnnnnnnnnnnnnnnnnnnnnnnnnnnnnnnnnnnnnnnnnnnnnnnnnnnnnnnnnnnnnnnnnnnnnnnnnnnnnnnnnnnnnnnnnnnnnnnnnnnnnnnnnnnnnnnnnnnnnnnnnnnnnnnnnnnnnnnnnnnnnnnnnnnnnnnnnnnnnnnnnnnnnnnnnnnnnnnnnnnnnnnnnnnnnnnnnnnnnnnnnnnnnnnnnnnnnnnnnnnnnnnnnnnnnnnnnnnnnnnnnnnnnnnnnnnnnnnnnnnnnnnnnnnnnnnnnnnnnnnnnnnnnnnnnnnnnnnnnnnnnnnnnnnnnnnnnnnnnnnnnnnnnnnnnnnnnnnnnnnnnnnnnnnnnnnnnnnnnnnnnnnnnnnnnnnnnnnnnnnnnnnnnnnnnnnnnnnnnnnnnnnnnnnnnnnnnnnnnnnnnnnnnnnnnnnnnnnnnnnnnnnnnnnnnnnnnnnnnnnnnnnnnnnnnnnnnnnnnnnnnnnnnnnnnnnnnnnnnnnnnnnnnnnnnnnnnnnnnnnnnnnnnnnnnnnnnnnnnnnnnnnnnnnnnnnnnnnnnnnnnnnnnnnnnnnnnnnnnnnnnnnnnnnnnnnnnnnnnnnnnnnnnnnnnnnnnnnnnnnnnnnnnnnnnnnnnnnnnnnnnnnnnnnnnnnnnnnnnnnnnnnnnnnnnnnnnnnnnnnnnnnnnnnnnnnnnnnnnnnnnnnnnnnnnnnnnnnnnnnnnnnnnnnnnnnnnnnnnnnnnnnnnnnnnnnnnnnnnnnnnnnnnnnnnnnnnnnnnnnnnnnnnnnnnnnnnnnnnnnnnnnnnnnnnnnnnnnnnnnnnnnnnnnnnnnnnnnnnnnnnnnnnnnnnnnnnnnnnnnnnnnnnnnnnnnnnnnnnnnnnnnnnnnnnnnnnnnnnnnnnnnnnnnnnnnnnnnnnnnnnnnnnnnnnnnnnnnnnnnnnnnnnnnnnnnnnnnnnnnnnnnnnnnnnnnnnnnnnnnnnnnnnnnnnnnnnnnnnnnnnnnnnnnnnnnnnnnnnnnnnnnnnnnnnnnnnnnnnnnnnnnnnnnnnnnnnnnnnnnnnnnnnnnnnnnnnnnnnnnnnnnnnnnnnnnnnnnnnnnnnnnnnnnnnnnnnnnnnnnnnnnnnnnnnnnnnnnnnnnnnnnnnnnnnnnnnnnnnnnnnnnnnnnnnnnnnnnnnnnnnnnnnnnnnnnnnnnnnnnnnnnnnnnnnnnnnnnnnnnnnnnnnnnnnnnnnnnnnnnnnnnnnnnnnnnnnnnnnnnnnnnnnnnnnnnnnnnnnnnnnnnnnnnnnnnnnnnnnnnnnnnnnnnnnnnnnnnnnnnnnnnnnnnnnnnnnnnnnnnnnnnnnnnnnnnnnnnnnnnnnnnnnnnnnnnnnnnnnnnnnnnnnnnnnnnnnnnnnnnnnnnnnnnnnnnnnnnnnnnnnnnnnnnnnnnnnnnnnnnnnnnnnnnnnnnnnnnnnnnnnnnnnnnnnnnnnnnnnnnnnnnnnnnnnnnnnnnnnnnnnnnnnnnnnnnnnnnnnnnnnnnnnnnnnnnnnnnnnnnnnnnnnnnnnnnnnnnnnnnnnnnnnnnnnnnnnnnnnnnnnnnnnnnnnnnnnnnnnnnnnnnnnnnnnnnnnnnnnnnnnnnnnnnnnnnnnnnnnnnnnnnnnnnnnnnnnnnnnnnnnnnnnnnnnnnnnnnnnnnnnnnnnnnnnnnnnnnnnnnnnnnnnnnnnnnnnnnnnnnnnnnnnnnnnnnnnnnnnnnnnnnnnnnnnnnnnnnnnnnnnnnnnnnnnnnnnnnnnnnnnnnnnnnnnnnnnnnnnnnnnnnnnnnnnnnnnnnnnnnnnnnnnnnnnnnnnnnnnnnnnnnnnnnnnnnnnnnnnnnnnnnnnnnnnnnnnnnnnnnnnnnnnnnnnnnnnnnnnnnnnnnnnnnnnnnnnnnnnnnnnnnnnnnnnnnnnnnnnnnnnnnnnnnnnnnnnnnnnnnnnnnnnnnnnnnnnnnnnnnnnnnnnnnnnnnnnnnnnnnnnnnnnnnnnnnnnnnnnnnnnnnnnnnnnnnnnnnnnnnnnnnnnnnnnnnnnnnnnnnnnnnnnnnnnnnnnnnnnnnnnnnnnnnnnnnnnnnnnnnnnnnnnnnnnnnnnnnnnnnnnnnnnnnnnnnnnnnnnnnnnnnnnnnnnnnnnnnnnnnnnnnnnnnnnnnnnnnnnnnnnnnnnnnnnnnnnnnnnnnnnnnnnnnnnnnnnnnnnnnnnnnnnnnnnnnnnnnnnnnnnnnnnnnnnnnnnnnnnnnnnnnnnnnnnnnnnnnnnnnnnnnnnnnnnnnnnnnnnnnnnnnnnnnnnnnnnnnnnnnnnnnnnnnnnnnnnnnnnnnnnnnnnnnnnnnnnnnnnnnnnnnnnnnnnnnnnnnnnnnnnnnnnnnnnnnnnnnnnnnnnnnnnnnnnnnnnnnnnnnnnnnnnnnnnnnnnnnnnnnnnnnnnnnnnnnnnnnnnnnnnnnnnnnnnnnnnnnnnnnnnnnnnnnnnnnnnnnnnnnnnnnnnnnnnnnnnnnnnnnnnnnnnnnnnnnnnnnnnnnnnnnnnnnnnnnnnnnnnnnnnnnnnnnnnnnnnnnnnnnnnnnnnnnnnnnnnnnnnnnnnnnnnnnnnnnnnnnnnnnnnnnnnnnnnnnnnnnnnnnnnnnnnnnnnnnnnnnnnnnnnnnnnnnnnnnnnnnnnnnnnnnnnnnnnnnnnnnnnnnnnnnnnnnnnnnnnnnnnnnnnnnnnnnnnnnnnnnnnnnnnnnnnnnnnnnnnnnnnnnnnnnnnnnnnnnnnnnnnnnnnnnnnnnnnnnnnnnnnnnnnnnnnnnnnnnnnnnnnnnnnnnnnnnnnnnnnnnnnnnnnnnnnnnnnnnnnnnnnnnnnnnnnnnnnnnnnnnnnnnnnnnnnnnnnnnnnnnnnnnnnnnnnnnnnnnnnnnnnnnnnnnnnnnnnnnnnnnnnnnnnnnnnnnnnnnnnnnnnnnnnnnnnnnnnnnnnnnnnnnnnnnnnnnnnnnnnnnnnnnnnnnnnnnnnnnnnnnnnnnnnnnnnnnnnnnnnnnnnnnnnnnnnnnnnnnnnnnnnnnnnnnnnnnnnnnnnnnnnnnnnnnnnnnnnnnnnnnnnnnnnnnnnnnnnnnnnnnnnnnnnnnnnnnnnnnnnnnnnnnnnnnnnnnnnnnnnnnnnnnnnnnnnnnnnnnnnnnnnnnnnnnnnnnnnnnnnnnnnnnnnnnnnnnnnnnnnnnnnnnnnnnnnnnnnnnnnnnnnnnnnnnnnnnnnnnnnnnnnnnnnnnnnnnnnnnnnnnnnnnnnnnnnnnnnnnnnnnnnnnnnnnnnnnnnnnnnnnnnnnnnnnnnnnnnnnnnnnnnnnnnnnnnnnnnnnnnnnnnnnnnnnnnnnnnnnnnnnnnnnnnnnnnnnnnnnnnnnnnnnnnnnnnnnnnnnnnnnnnnnnnnnnnnnnnnnnnnnnnnnnnnnnnnnnnnnnnnnnnnnnnnnnnnnnnnnnnnnnnnnnnnnnnnnnnnnnnnnnnnnnnnnnnnnnnnnnnnnnnnnnnnnnnnnnnnnnnnnnnnnnnnnnnnnnnnnnnnnnnnnnnnnnnnnnnnnnnnnnnnnnnnnnnnnnnnnnnnnnnnnnnnnnnnnnnnnnnnnnnnnnnnnnnnnnnnnnnnnnnnnnnnnnnnnnnnnnnnnnnnnnnnnnnnnnnnnnnnnnnnnnnnnnnnnnnnnnnnnnnnnnnnnnnnnnnnnnnnnnnnnnnnnnnnnnnnnnnnnnnnnnnnnnnnnnnnnnnnnnnnnnnnnnnnnnnnnnnnnnnnnnnnnnnnnnnnnnnnnnnnnnnnnnnnnnnnnnnnnnnnnnnnnnnnnnnnnnnnnnnnnnnnnnnnnnnnnnnnnnnnnnnnnnnnnnnnnnnnnnnnnnnnnnnnnnnnnnnnnnnnnnnnnnnnnnnnnnnnnnnnnnnnnnnnnnnnnnnnnnnnnnnnnnnnnnnnnnnnnnnnnnnnnnnnnnnnnnnnnnnnnnnnnnnnnnnnnnnnnnnnnnnnnnnnnnnnnnnnnnnnnnnnnnnnnnnnnnnnnnnnnnnnnnnnnnnnnnnnnnnnnnnnnnnnnnnnnnnnnnnnnnnnnnnnnnnnnnnnnnnnnnnnnnnnnnnnnnnnnnnnnnnnnnnnnnnnnnnnnnnnnnnnnnnnnnnnnnnnnnnnnnnnnnnnnnnnnnnnnnnnnnnnnnnnnnnnnnnnnnnnnnnnnnnnnnnnnnnnnnnnnnnnnnnnnnnnnnnnnnnnnnnnnnnnnnnnnnnnnnnnnnnnnnnnnnnnnnnnnnnnnnnnnnnnnnnnnnnnnnnnnnnnnnnnnnnnnnnnnnnnnnnnnnnnnnnnnnnnnnnnnnnnnnnnnnnnnnnnnnnnnnnnnnnnnnnnnnnnnnnnnnnnnnnnnnnnnnnnnnnnnnnnnnnnnnnnnnnnnnnnnnnnnnnnnnnnnnnnnnnnnnnnnnnnnnnnnnnnnnnnnnnnnnnnnnnnnnnnnnnnnnnnnnnnnnnnnnnnnnnnnnnnnnnnnnnnnnnnnnnnnnnnnnnnnnnnnnnnnnnnnnnnnnnnnnnnnnnnnnnnnnnnnnnnnnnnnnnnnnnnnnnnnnnnnnnnnnnnnnnnnnnnnnnnnnnnnnnnnnnnnnnnnnnnnnnnnnnnnnnnnnnnnnnnnnnnnnnnnnnnnnnnnnnnnnnnnnnnnnnnnnnnnnnnnnnnnnnnnnnnnnnnnnnnnnnnnnnnnnnnnnnnnnnnnnnnnnnnnnnnnnnnnnnnnnnnnnnnnnnnnnnnnnnnnnnnnnnnnnnnnnnnnnnnnnnnnnnnnnnnnnnnnnnnnnnnnnnnnnnnnnnnnnnnnnnnnnnnnnnnnnnnnnnnnnnnnnnnnnnnnnnnnnnnnnnnnnnnnnnnnnnnnnnnnnnnnnnnnnnnnnnnnnnnnnnnnnnnnnnnnnnnnnnnnnnnnnnnnnnnnnnnnnnnnnnnnnnnnnnnnnnnnnnnnnnnnnnnnnnnnnnnnnnnnnnnnnnnnnnnnnnnnnnnnnnnnnnnnnnnnnnnnnnnnnnnnnnnnnnnnnnnnnnnnnnnnnnnnnnnnnnnnnnnnnnnnnnnnnnnnnnnnnnnnnnnnnnnnnnnnnnnnnnnnnnnnnnnnnnnnnnnnnnnnnnnnnnnnnnnnnnnnnnnnnnnnnnnnnnnnnnnnnnnnnnnnnnnnnnnnnnnnnnnnnnnnnnnnnnnnnnnnnnnnnnnnnnnnnnnnnnnnnnnnnnnnnnnnnnnnnnnnnnnnnnnnnnnnnnnnnnnnnnnnnnnnnnnnnnnnnnnnnnnnnnnnnnnnnnnnnnnnnnnnnnnnnnnnnnnnnnnnnnnnnnnnnnnnnnnnnnnnnnnnnnnnnnnnnnnnnnnnnnnnnnnnnnnnnnnnnnnnnnnnnnnnnnnnnnnnnnnnnnnnnnnnnnnnnnnnnnnnnnnnnnnnnnnnnnnnnnnnnnnnnnnnnnnnnnnnnnnnnnnnnnnnnnnnnnnnnnnnnnnnnnnnnnnnnnnnnnnnnnnnnnnnnnnnnnnnnnnnnnnnnnnnnnnnnnnnnnnnnnnnnnnnnnnnnnnnnnnnnnnnnnnnnnnnnnnnnnnnnnnnnnnnnnnnnnnnnnnnnnnnnnnnnnnnnnnnnnnnnnnnnnnnnnnnnnnnnnnnnnnnnnnnnnnnnnnnnnnnnnnnnnnnnnnnnnnnnnnnnnnnnnnnnnnnnnnnnnnnnnnnnnnnnnnnnnnnnnnnnnnnnnnnnnnnnnnnnnnnnnnnnnnnnnnnnnnnnnnnnnnnnnnnnnnnnnnnnnnnnnnnnnnnnnnnnnnnnnnnnnnnnnnnnnnnnnnnnnnnnnnnnnnnnnnnnnnnnnnnnnnnnnnnnnnnnnnnnnnnnnnnnnnnnnnnnnnnnnnnnnnnnnnnnnnnnnnnnnnnnnnnnnnnnnnnnnnnnnnnnnnnnnnnnnnnnnnnnnnnnnnnnnnnnnnnnnnnnnnnnnnnnnnnnnnnnnnnnnnnnnnnnnnnnnnnnnnnnnnnnnnnnnnnnnnnnnnnnnnnnnnnnnnnnnnnnnnnnnnnnnnnnnnnnnnnnnnnnnnnnnnnnnnnnnnnnnnnnnnnnnnnnnnnnnnnnnnnnnnnnnnnnnnnnnnnnnnnnnnnnnnnnnnnnnnnnnnnnnnnnnnnnnnnnnnnnnnnnnnnnnnnnnnnnnnnnnnnnnnnnnnnnnnnnnnnnnnnnnnnnnnnnnnnnnnnnnnnnnnnnnnnnnnnnnnnnnnnnnnnnnnnnnnnnnnnnnnnnnnnnnnnnnnnnnnnnnnnnnnnnnnnnnnnnnnnnnnnnnnnnnnnnnnnnnnnnnnnnnnnnnnnnnnnnnnnnnnnnnnnnnnnnnnnnnnnnnnnnnnnnnnnnnnnnnnnnnnnnnnnnnnnnnnnnnnnnnnnnnnnnnnnnnnnnnnnnnnnnnnnnnnnnnnnnnnnnnnnnnnnnnnnnnnnnnnnnnnnnnnnnnnnnnnnnnnnnnnnnnnnnnnnnnnnnnnnnnnnnnnnnnnnnnnnnnnnnnnnnnnnnnnnnnnnnnnnnnnnnnnnnnnnnnnnnnnnnnnnnnnnnnnnnnnnnnnnnnnnnnnnnnnnnnnnnnnnnnnnnnnnnnnnnnnnnnnnnnnnnnnnnnnnnnnnnnnnnnnnnnnnnnnnnnnnnnnnnnnnnnnnnnnnnnnnnnnnnnnnnnnnnnnnnnnnnnnnnnnnnnnnnnnnnnnnnnnnnnnnnnnnnnnnnnnnnnnnnnnnnnnnnnnnnnnnnnnnnnnnnnnnnnnnnnnnnnnnnnnnnnnnnnnnnnnnnnnnnnnnnnnnnnnnnnnnnnnnnnnnnnnnnnnnnnnnnnnnnnnnnnnnnnnnnnnnnnnnnnnnnnnnnnnnnnnnnnnnnnnnnnnnnnnnnnnnnnnnnnnnnnnnnnnnnnnnnnnnnnnnnnnnnnnnnnnnnnnnnnnnnnnnnnnnnnnnnnnnnnnnnnnnnnnnnnnnnnnnnnnnnnnnnnnnnnnnnnnnnnnnnnnnnnnnnnnnnnnnnnnnnnnnnnnnnnnnnnnnnnnnnnnnnnnnnnnnnnnnnnnnnnnnnnnnnnnnnnnnnnnnnnnnnnnnnnnnnnnnnnnnnnnnnnnnnnnnnnnnnnnnnnnnnnnnnnnnnnnnnnnnnnnnnnnnnnnnnnnnnnnnnnnnnnnnnnnnnnnnnnnnnnnnnnnnnnnnnnnnnnnnnnnnnnnnnnnnnnnnnnnnnnnnnnnnnnnnnnnnnnnnnnnnnnnnnnnnnnnnnnnnnnnnnnnnnnnnnnnnnnnnnnnnnnnnnnnnnnnnnnnnnnnnnnnnnnnnnnnnnnnnnnnnnnnnnnnnnnnnnnnnnnnnnnnnnnnnnnnnnnnnnnnnnnnnnnnnnnnnnnnnnnnnnnnnnnnnnnnnnnnnnnnnnnnnnnnnnnnnnnnnnnnnnnnnnnnnnnnnnnnnnnnnnnnnnnnnnnnnnnnnnnnnnnnnnnnnnnnnnnnnnnnnnnnnnnnnnnnnnnnnnnnnnnnnnnnnnnnnnnnnnnnnnnnnnnnnnnnnnnnnnnnnnnnnnnnnnnnnnnnnnnnnnnnnnnnnnnnnnnnnnnnnnnnnnnnnnnnnnnnnnnnnnnnnnnnnnnnnnnnnnnnnnnnnnnnnnnnnnnnnnnnnnnnnnnnnnnnnnnnnnnnnnnnnnnnnnnnnnnnnnnnnnnnnnnnnnnnnnnnnnnnnnnnnnnnnnnnnnnnnnnnnnnnnnnnnnnnnnnnnnnnnnnnnnnnnnnnnnnnnnnnnnnnnnnnnnnnnnnnnnnnnnnnnnnnnnnnnnnnnnnnnnnnnnnnnnnnnnnnnnnnnnnnnnnnnnnnnnnnnnnnnnnnnnnnnnnnnnnnnnnnnnnnnnnnnnnnnnnnnnnnnnnnnnnnnnnnnnnnnnnnnnnnnnnnnnnnnnnnnnnnnnnnnnnnnnnnnnnnnnnnnnnnnnnnnnnnnnnnnnnnnnnnnnnnnnnnnnnnnnnnnnnnnnnnnnnnnnnnnnnnnnnnnnnnnnnnnnnnnnnnnnnnnnnnnnnnnnnnnnnnnnnnnnnnnnnnnnnnnnnnnnnnnnnnnnnnnnnnnnnnnnnnnnnnnnnnnnnnnnnnnnnnnnnnnnnnnnnnnnnnnnnnnnnnnnnnnnnnnnnnnnnnnnnnnnnnnnnnnnnnnnnnnnnnnnnnnnnnnnnnnnnnnnnnnnnnnnnnnnnnnnnnnnnnnnnnnnnnnnnnnnnnnnnnnnnnnnnnnnnnnnnnnnnnnnnnnnnnnnnnnnnnnnnnnnnnnnnnnnnnnnnnnnnnnnnnnnnnnnnnnnnnnnnnnnnnnnnnnnnnnnnnnnnnnnnnnnnnnnnnnnnnnnnnnnnnnnnnnnnnnnnnnnnnnnnnnnnnnnnnnnnnnnnnnnnnnnnnnnnnnnnnnnnnnnnnnnnnnnnnnnnnnnnnnnnnnnnnnnnnnnnnnnnnnnnnnnnnnnnnnnnnnnnnnnnnnnnnnnnnnnnnnnnnnnnnnnnnnnnnnnnnnnnnnnnnnnnnnnnnnnnnnnnnnnnnnnnnnnnnnnnnnnnnnnnnnnnnnnnnnnnnnnnnnnnnnnnnnnnnnnnnnnnnnnnnnnnnnnnnnnnnnnnnnnnnnnnnnnnnnnnnnnnnnnnnnnnnnnnnnnnnnnnnnnnnnnnnnnnnnnnnnnnnnnnnnnnnnnnnnnnnnnnnnnnnnnnnnnnnnnnnnnnnnnnnnnnnnnnnnnnnnnnnnnnnnnnnnnnnnnnnnnnnnnnnnnnnnnnnnnnnnnnnnnnnnnnnnnnnnnnnnnnnnnnnnnnnnnnnnnnnnnnnnnnnnnnnnnnnnnnnnnnnnnnnnnnnnnnnnnnnnnnnnnnnnnnnnnnnnnnnnnnnnnnnnnnnnnnnnnnnnnnnnnnnnnnnnnnnnnnnnnnnnnnnnnnnnnnnnnnnnnnnnnnnnnnnnnnnnnnnnnnnnnnnnnnnnnnnnnnnnnnnnnnnnnnnnnnnnnnnnnnnnnnnnnnnnnnnnnnnnnnnnnnnnnnnnnnnnnnnnnnnnnnnnnnnnnnnnnnnnnnnnnnnnnnnnnnnnnnnnnnnnnnnnnnnnnnnnnnnnnnnnnnnnnnnnnnnnnnnnnnnnnnnnnnnnnnnnnnnnnnnnnnnnnnnnnnnnnnnnnnnnnnnnnnnnnnnnnnnnnnnnnnnnnnnnnnnnnnnnnnnnnnnnnnnnnnnnnnnnnnnnnnnnnnnnnnnnnnnnnnnnnnnnnnnnnnnnnnnnnnnnnnnnnnnnnnnnnnnnnnnnnnnnnnnnnnnnnnnnnnnnnnnnnnnnnnnnnnnnnnnnnnnnnnnnnnnnnnnnnnnnnnnnnnnnnnnnnnnnnnnnnnnnnnnnnnnnnnnnnnnnnnnnnnnnnnnnnnnnnnnnnnnnnnnnnnnnnnnnnnnnnnnnnnnnnnnnnnnnnnnnnnnnnnnnnnnnnnnnnnnnnnnnnnnnnnnnnnnnnnnnnnnnnnnnnnnnnnnnnnnnnnnnnnnnnnnnnnnnnnnnnnnnnnnnnnnnnnnnnnnnnnnnnnnnnnnnnnnnnnnnnnnnnnnnnnnnnnnnnnnnnnnnnnnnnnnnnnnnnnnnnnnnnnnnnnnnnnnnnnnnnnnnnnnnnnnnnnnnnnnnnnnnnnnnnnnnnnnnnnnnnnnnnnnnnnnnnnnnnnnnnnnnnnnnnnnnnnnnnnnnnnnnnnnnnnnnnnnnnnnnnnnnnnnnnnnnnnnnnnnnnnnnnnnnnnnnnnnnnnnnnnnnnnnnnnnnnnnnnnnnnnnnnnnnnnnnnnnnnnnnnnnnnnnnnnnnnnnnnnnnnnnnnnnnnnnnnnnnnnnnnnnnnnnnnnnnnnnnnnnnnnnnnnnnnnnnnnnnnnnnnnnnnnnnnnnnnnnnnnnnnnnnnnnnnnnnnnnnnnnnnnnnnnnnnnnnnnnnnnnnnnnnnnnnnnnnnnnnnnnnnnnnnnnnnnnnnnnnnnnnnnnnnnnnnnnnnnnnnnnnnnnnnnnnnnnnnnnnnnnnnnnnnnnnnnnnnnnnnnnnnnnnnnnnnnnnnnnnnnnnnnnnnnnnnnnnnnnnnnnnnnnnnnnnnnnnnnnnnnnnnnnnnnnnnnnnnnnnnnnnnnnnnnnnnnnnnnnnnnnnnnnnnnnnnnnnnnnnnnnnnnnnnnnnnnnnnnnnnnnnnnnnnnnnnnnnnnnnnnnnnnnnnnnnnnnnnnnnnnnnnnnnnnnnnnnnnnnnnnnnnnnnnnnnnnnnnnnnnnnnnnnnnnnnnnnnnnnnnnnnnnnnnnnnnnnnnnnnnnnnnnnnnnnnnnnnnnnnnnnnnnnnnnnnnnnnnnnnnnnnnnnnnnnnnnnnnnnnnnnnnnnnnnnnnnnnnnnnnnnnnnnnnnnnnnnnnnnnnnnnnnnnnnnnnnnnnnnnnnnnnnnnnnnnnnnnnnnnnnnnnnnnnnnnnnnnnnnnnnnnnnnnnnnnnnnnnnnnnnnnnnnnnnnnnnnnnnnnnnnnnnnnnnnnnnnnnnnnnnnnnnnnnnnnnnnnnnnnnnnnnnnnnnnnnnnnnnnnnnnnnnnnnnnnnnnnnnnnnnnnnnnnnnnnnnnnnnnnnnnnnnnnnnnnnnnnnnnnnnnnnnnnnnnnnnnnnnnnnnnnnnnnnnnnnnnnnnnnnnnnnnnnnnnnnnnnnnnnnnnnnnnnnnnnnnnnnnnnnnnnnnnnnnnnnnnnnnnnnnnnnnnnnnnnnnnnnnnnnnnnnnnnnnnnnnnnnnnnnnnnnnnnnnnnnnnnnnnnnnnnnnnnnnnnnnnnnnnnnnnnnnnnnnnnnnnnnnnnnnnnnnnnnnnnnnnnnnnnnnnnnnnnnnnnnnnnnnnnnnnnnnnnnnnnnnnnnnnnnnnnnnnnnnnnnnnnnnnnnnnnnnnnnnnnnnnnnnnnnnnnnnnnnnnnnnnnnnnnnnnnnnnnnnnnnnnnnnnnnnnnnnnnnnnnnnnnnnnnnnnnnnnnnnnnnnnnnnnnnnnnnnnnnnnnnnnnnnnnnnnnnnnnnnnnnnnnnnnnnnnnnnnnnnnnnnnnnnnnnnnnnnnnnnnnnnnnnnnnnnnnnnnnnnnnnnnnnnnnnnnnnnnnnnnnnnnnnnnnnnnnnnnnnnnnnnnnnnnnnnnnnnnnnnnnnnnnnnnnnnnnnnnnnnnnnnnnnnnnnnnnnnnnnnnnnnnnnnnnnnnnnnnnnnnnnnnnnnnnnnnnnnnnnnnnnnnnnnnnnnnnnnnnnnnnnnnnnnnnnnnnnnnnnnnnnnnnnnnnnnnnnnnnnnnnnnnnnnnnnnnnnnnnnnnnnnnnnnnnnnnnnnnnnnnnnnnnnnnnnnnnnnnnnnnnnnnnnnnnnnnnnnnnnnnnnnnnnnnnnnnnnnnnnnnnnnnnnnnnnnnnnnnnnnnnnnnnnnnnnnnnnnnnnnnnnnnnnnnnnnnnnnnnnnnnnnnnnnnnnnnnnnnnnnnnnnnnnnnnnnnnnnnnnnnnnnnnnnnnnnnnnnnnnnnnnnnnnnnnnnnnnnnnnnnnnnnnnnnnnnnnnnnnnnnnnnnnnnnnnnnnnnnnnnnnnnnnnnnnnnnnnnnnnnnnnnnnnnnnnnnnnnnnnnnnnnnnnnnnnnnnnnnnnnnnnnnnnnnnnnnnnnnnnnnnnnnnnnnnnnnnnnnnnnnnnnnnnnnnnnnnnnnnnnnnnnnnnnnnnnnnnnnnnnnnnnnnnnnnnnnnnnnnnnnnnnnnnnnnnnnnnnnnnnnnnnnnnnnnnnnnnnnnnnnnnnnnnnnnnnnnnnnnnnnnnnnnnnnnnnnnnnnnnnnnnnnnnnnnnnnnnnnnnnnnnnnnnnnnnnnnnnnnnnnnnnnnnnnnnnnnnnnnnnnnnnnnnnnnnnnnnnnnnnnnnnnnnnnnnnnnnnnnnnnnnnnnnnnnnnnnnnnnnnnnnnnnnnnnnnnnnnnnnnnnnnnnnnnnnnnnnnnnnnnnnnnnnnnnnnnnnnnnnnnnnnnnnnnnnnnnnnnnnnnnnnnnnnnnnnnnnnnnnnnnnnnnnnnnnnnnnnnnnnnnnnnnnnnnnnnnnnnnnnnnnnnnnnnnnnnnnnnnnnnnnnnnnnnnnnnnnnnnnnnnnnnnnnnnnnnnnnnnnnnnnnnnnnnnnnnnnnnnnnnnnnnnnnnnnnnnnnnnnnnnnnnnnnnnnnnnnnnnnnnnnnnnnnnnnnnnnnnnnnnnnnnnnnnnnnnnnnnnnnnnnnnnnnnnnnnnnnnnnnnnnnnnnnnnnnnnnnnnnnnnnnnnnnnnnnnnnnnnnnnnnnnnnnnnnnnnnnnnnnnnnnnnnnnnnnnnnnnnnnnnnnnnnnnnnnnnnnnnnnnnnnnnnnnnnnnnnnnnnnnnnnnnnnnnnnnnnnnnnnnnnnnnnnnnnnnnnnnnnnnnnnnnnnnnnnnnnnnnnnnnnnnnnnnnnnnnnnnnnnnnnnnnnnnnnnnnnnnnnnnnnnnnnnnnnnnnnnnnnnnnnnnnnnnnnnnnnnnnnnnnnnnnnnnnnnnnnnnnnnnnnnnnnnnnnnnnnnnnnnnnnnnnnnnnnnnnnnnnnnnnnnnnnnnnnnnnnnnnnnnnnnnnnnnnnnnnnnnnnnnnnnnnnnnnnnnnnnnnnnnnnnnnnnnnnnnnnnnnnnnnnnnnnnnnnnnnnnnnnnnnnnnnnnnnnnnnnnnnnnnnnnnnnnnnnnnnnnnnnnnnnnnnnnnnnnnnnnnnnnnnnnnnnnnnnnnnnnnnnnnnnnnnnnnnnnnnnnnnnnnnnnnnnnnnnnnnnnnnnnnnnnnnnnnnnnnnnnnnnnnnnnnnnnnnnnnnnnnnnnnnnnnnnnnnnnnnnnnnnnnnnnnnnnnnnnnnnnnnnnnnnnnnnnnnnnnnnnnnnnnnnnnnnnnnnnnnnnnnnnnnnnnnnnnnnnnnnnnnnnnnnnnnnnnnnnnnnnnnnnnnnnnnnnnnnnnnnnnnnnnnnnnnnnnnnnnnnnnnnnnnnnnnnnnnnnnnnnnnnnnnnnnnnnnnnnnnnnnnnnnnnnnnnnnnnnnnnnnnnnnnnnnnnnnnnnnnnnnnnnnnnnnnnnnnnnnnnnnnnnnnnnnnnnnnnnnnnnnnnnnnnnnnnnnnnnnnnnnnnnnnnnnnnnnnnnnnnnnnnnnnnnnnnnnnnnnnnnnnnnnnnnnnnnnnnnnnnnnnnnnnnnnnnnnnnnnnnnnnnnnnnnnnnnnnnnnnnnnnnnnnnnnnnnnnnnnnnnnnnnnnnnnnnnnnnnnnnnnnnnnnnnnnnnnnnnnnnnnnnnnnnnnnnnnnnnnnnnnnnnnnnnnnnnnnnnnnnnnnnnnnnnnnnnnnnnnnnnnnnnnnnnnnnnnnnnnnnnnnnnnnnnnnnnnnnnnnnnnnnnnnnnnnnnnnnnnnnnnnnnnnnnnnnnnnnnnnnnnnnnnnnnnnnnnnnnnnnnnnnnnnnnnnnnnnnnnnnnnnnnnnnnnnnnnnnnnnnnnnnnnnnnnnnnnnnnnnnnnnnnnnnnnnnnnnnnnnnnnnnnnnnnnnnnnnnnnnnnnnnnnnnnnnnnnnnnnnnnnnnnnnnnnnnnnnnnnnnnnnnnnnnnnnnnnnnnnnnnnnnnnnnnnnnnnnnnnnnnnnnnnnnnnnnnnnnnnnnnnnnnnnnnnnnnnnnnnnnnnnnnnnnnnnnnnnnnnnnnnnnnnnnnnnnnnnnnnnnnnnnnnnnnnnnnnnnnnnnnnnnnnnnnnnnnnnnnnnnnnnnnnnnnnnnnnnnnnnnnnnnnnnnnnnnnnnnnnnnnnnnnnnnnnnnnnnnnnnnnnnnnnnnnnnnnnnnnnnnnnnnnnnnnnnnnnnnnnnnnnnnnnnnnnnnnnnnnnnnnnnnnnnnnnnnnnnnnnnnnnnnnnnnnnnnnnnnnnnnnnnnnnnnnnnnnnnnnnnnnnnnnnnnnnnnnnnnnnnnnnnnnnnnnnnnnnnnnnnnnnnnnnnnnnnnnnnnnnnnnnnnnnnnnnnnnnnnnnnnnnnnnnnnnnnnnnnnnnnnnnnnnnnnnnnnnnnnnnnnnnnnnnnnnnnnnnnnnnnnnnnnnnnnnnnnnnnnnnnnnnnnnnnnnnnnnnnnnnnnnnnnnnnnnnnnnnnnnnnnnnnnnnnnnnnnnnnnnnnnnnnnnnnnnnnnnnnnnnnnnnnnnnnnnnnnnnnnnnnnnnnnnnnnnnnnnnnnnnnnnnnnnnnnnnnnnnnnnnnnnnnnnnnnnnnnnnnnnnnnnnnnnnnnnnnnnnnnnnnnnnnnnnnnnnnnnnnnnnnnnnnnnnnnnnnnnnnnnnnnnnnnnnnnnnnnnnnnnnnnnnnnnnnnnnnnnnnnnnnnnnnnnnnnnnnnnnnnnnnnnnnnnnnnnnnnnnnnnnnnnnnnnnnnnnnnnnnnnnnnnnnnnnnnnnnnnnnnnnnnnnnnnnnnnnnnnnnnnnnnnnnnnnnnnnnnnnnnnnnnnnnnnnnnnnnnnnnnnnnnnnnnnnnnnnnnnnnnnnnnnnnnnnnnnnnnnnnnnnnnnnnnnnnnnnnnnnnnnnnnnnnnnnnnnnnnnnnnnnnnnnnnnnnnnnnnnnnnnnnnnnnnnnnnnnnnnnnnnnnnnnnnnnnnnnnnnnnnnnnnnnnnnnnnnnnnnnnnnnnnnnnnnnnnnnnnnnnnnnnnnnnnnnnnnnnnnnnnnnnnnnnnnnnnnnnnnnnnnnnnnnnnnnnnnnnnnnnnnnnnnnnnnnnnnnnnnnnnnnnnnnnnnnnnnnnnnnnnnnnnnnnnnnnnnnnnnnnnnnnnnnnnnnnnnnnnnnnnnnnnnnnnnnnnnnnnnnnnnnnnnnnnnnnnnnnnnnnnnnnnnnnnnnnnnnnnnnnnnnnnnnnnnnnnnnnnnnnnnnnnnnnnnnnnnnnnnnnnnnnnnnnnnnnnnnnnnnnnnnnnnnnnnnnnnnnnnnnnnnnnnnnnnnnnnnnnnnnnnnnnnnnnnnnnnnnnnnnnnnnnnnnnnnnnnnnnnnnnnnnnnnnnnnnnnnnnnnnnnnnnnnnnnnnnnnnnnnnnnnnnnnnnnnnnnnnnnnnnnnnnnnnnnnnnnnnnnnnnnnnnnnnnnnnnnnnnnnnnnnnnnnnnnnnnnnnnnnnnnnnnnnnnnnnnnnnnnnnnnnnnnnnnnnnnnnnnnnnnnnnnnnnnnnnnnnnnnnnnnnnnnnnnnnnnnnnnnnnnnnnnnnnnnnnnnnnnnnnnnnnnnnnnnnnnnnnnnnnnnnnnnnnnnnnnnnnnnnnnnnnnnnnnnnnnnnnnnnnnnnnnnnnnnnnnnnnnnnnnnnnnnnnnnnnnnnnnnnnnnnnnnnnnnnnnnnnnnnnnnnnnnnnnnnnnnnnnnnnnnnnnnnnnnnnnnnnnnnnnnnnnnnnnnnnnnnnnnnnnnnnnnnnnnnnnnnnnnnnnnnnnnnnnnnnnnnnnnnnnnnnnnnnnnnnnnnnnnnnnnnnnnnnnnnnnnnnnnnnnnnnnnnnnnnnnnnnnnnnnnnnnnnnnnnnnnnnnnnnnnnnnnnnnnnnnnnnnnnnnnnnnnnnnnnnnnnnnnnnnnnnnnnnnnnnnnnnnnnnnnnnnnnnnnnnnnnnnnnnnnnnnnnnnnnnnnnnnnnnnnnnnnnnnnnnnnnnnnnnnnnnnnnnnnnnnnnnnnnnnnnnnnnnnnnnnnnnnnnnnnnnnnnnnnnnnnnnnnnnnnnnnnnnnnnnnnnnnnnnnnnnnnnnnnnnnnnnnnnnnnnnnnnnnnnnnnnnnnnnnnnnnnnnnnnnnnnnnnnnnnnnnnnnnnnnnnnnnnnnnnnnnnnnnnnnnnnnnnnnnnnnnnnnnnnnnnnnnnnnnnnnnnnnnnnnnnnnnnnnnnnnnnnnnnnnnnnnnnnnnnnnnnnnnnnnnnnnnnnnnnnnnnnnnnnnnnnnnnnnnnnnnnnnnnnnnnnnnnnnnnnnnnnnnnnnnnnnnnnnnnnnnnnnnnnnnnnnnnnnnnnnnnnnnnnnnnnnnnnnnnnnnnnnnnnnnnnnnnnnnnnnnnnnnnnnnnnnnnnnnnnnnnnnnnnnnnnnnnnnnnnnnnnnnnnnnnnnnnnnnnnnnnnnnnnnnnnnnnnnnnnnnnnnnnnnnnnnnnnnnnnnnnnnnnnnnnnnnnnnnnnnnnnnnnnnnnnnnnnnnnnnnnnnnnnnnnnnnnnnnnnnnnnnnnnnnnnnnnnnnnnnnnnnnnnnnnnnnnnnnnnnnnnnnnnnnnnnnnnnnnnnnnnnnnnnnnnnnnnnnnnnnnnnnnnnnnnnnnnnnnnnnnnnnnnnnnnnnnnnnnnnnnnnnnnnnnnnnnnnnnnnnnnnnnnnnnnnnnnnnnnnnnnnnnnnnnnnnnnnnnnnnnnnnnnnnnnnnnnnnnnnnnnnnnnnnnnnnnnnnnnnnnnnnnnnnnnnnnnnnnnnnnnnnnnnnnnnnnnnnnnnnnnnnnnnnnnnnnnnnnnnnnnnnnnnnnnnnnnnnnnnnnnnnnnnnnnnnnnnnnnnnnnnnnnnnnnnnnnnnnnnnnnnnnnnnnnnnnnnnnnnnnnnnnnnnnnnnnnnnnnnnnnnnnnnnnnnnnnnnnnnnnnnnnnnnnnnnnnnnnnnnnnnnnnnnnnnnnnnnnnnnnnnnnnnnnnnnnnnnnnnnnnnnnnnnnnnnnnnnnnnnnnnnnnnnnnnnnnnnnnnnnnnnnnnnnnnnnnnnnnnnnnnnnnnnnnnnnnnnnnnnnnnnnnnnnnnnnnnnnnnnnnnnnnnnnnnnnnnnnnnnnnnnnnnnnnnnnnnnnnnnnnnnnnnnnnnnnnnnnnnnnnnnnnnnnnnnnnnnnnnnnnnnnnnnnnnnnnnnnnnnnnnnnnnnnnnnnnnnnnnnnnnnnnnnnnnnnnnnnnnnnnnnnnnnnnnnnnnnnnnnnnnnnnnnnnnnnnnnnnnnnnnnnnnnnnnnnnnnnnnnnnnnnnnnnnnnnnnnnnnnnnnnnnnnnnnnnnnnnnnnnnnnnnnnnnnnnnnnnnnnnnnnnnnnnnnnnnnnnnnnnnnnnnnnnnnnnnnnnnnnnnnnnnnnnnnnnnnnnnnnnnnnnnnnnnnnnnnnnnnnnnnnnnnnnnnnnnnnnnnnnnnnnnnnnnnnnnnnnnnnnnnnnnnnnnnnnnnnnnnnnnnnnnnnnnnnnnnnnnnnnnnnnnnnnnnnnnnnnnnnnnnnnnnnnnnnnnnnnnnnnnnnnnnnnnnnnnnnnnnnnnnnnnnnnnnnnnnnnnnnnnnnnnnnnnnnnnnnnnnnnnnnnnnnnnnnnnnnnnnnnnnnnnnnnnnnnnnnnnnnnnnnnnnnnnnnnnnnnnnnnnnnnnnnnnnnnnnnnnnnnnnnnnnnnnnnnnnnnnnnnnnnnnnnnnnnnnnnnnnnnnnnnnnnnnnnnnnnnnnnnnnnnnnnnnnnnnnnnnnnnnnnnnnnnnnnnnnnnnnnnnnnnnnnnnnnnnnnnnnnnnnnnnnnnnnnnnnnnnnnnnnnnnnnnnnnnnnnnnnnnnnnnnnnnnnnnnnnnnnnnnnnnnnnnnnnnnnnnnnnnnnnnnnnnnnnnnnnnnnnnnnnnnnnnnnnnnnnnnnnnnnnnnnnnnnnnnnnnnnnnnnnnnnnnnnnnnnnnnnnnnnnnnnnnnnnnnnnnnnnnnnnnnnnnnnnnnnnnnnnnnnnnnnnnnnnnnnnnnnnnnnnnnnnnnnnnnnnnnnnnnnnnnnnnnnnnnnnnnnnnnnnnnnnnnnnnnnnnnnnnnnnnnnnnnnnnnnnnnnnnnnnnnnnnnnnnnnnnnnnnnnnnnnnnnnnnnnnnnnnnnnnnnnnnnnnnnnnnnnnnnnnnnnnnnnnnnnnnnnnnnnnnnnnnnnnnnnnnnnnnnnnnnnnnnnnnnnnnnnnnnnnnnnnnnnnnnnnnnnnnnnnnnnnnnnnnnnnnnnnnnnnnnnnnnnnnnnnnnnnnnnnnnnnnnnnnnnnnnnnnnnnnnnnnnnnnnnnnnnnnnnnnnnnnnnnnnnnnnnnnnnnnnnnnnnnnnnnnnnnnnnnnnnnnnnnnnnnnnnnnnnnnnnnnnnnnnnnnnnnnnnnnnnnnnnnnnnnnnnnnnnnnnnnnnnnnnnnnnnnnnnnnnnnnnnnnnnnnnnnnnnnnnnnnnnnnnnnnnnnnnnnnnnnnnnnnnnnnnnnnnnnnnnnnnnnnnnnnnnnnnnnnnnnnnnnnnnnnnnnnnnnnnnnnnnnnnnnnnnnnnnnnnnnnnnnnnnnnnnnnnnnnnnnnnnnnnnnnnnnnnnnnnnnnnnnnnnnnnnnnnnnnnnnnnnnnnnnnnnnnnnnnnnnnnnnnnnnnnnnnnnnnnnnnnnnnnnnnnnnnnnnnnnnnnnnnnnnnnnnnnnnnnnnnnnnnnnnnnnnnnnnnnnnnnnnnnnnnnnnnnnnnnnnnnnnnnnnnnnnnnnnnnnnnnnnnnnnnnnnnnnnnnnnnnnnnnnnnnnnnnnnnnnnnnnnnnnnnnnnnnnnnnnnnnnnnnnnnnnnnnnnnnnnnnnnnnnnnnnnnnnnnnnnnnnnnnnnnnnnnnnnnnnnnnnnnnnnnnnnnnnnnnnnnnnnnnnnnnnnnnnnnnnnnnnnnnnnnnnnnnnnnnnnnnnnnnnnnnnnnnnnnnnnnnnnnnnnnnnnnnnnnnnnnnnnnnnnnnnnnnnnnnnnnnnnnnnnnnnnnnnnnnnnnnnnnnnnnnnnnnnnnnnnnnnnnnnnnnnnnnnnnnnnnnnnnnnnnnnnnnnnnnnnnnnnnnnnnnnnnnnnnnnnnnnnnnnnnnnnnnnnnnnnnnnnnnnnnnnnnnnnnnnnnnnnnnnnnnnnnnnnnnnnnnnnnnnnnnnnnnnnnnnnnnnnnnnnnnnnnnnnnnnnnnnnnnnnnnnnnnnnnnnnnnnnnnnnnnnnnnnnnnnnnnnnnnnnnnnnnnnnnnnnnnnnnnnnnnnnnnnnnnnnnnnnnnnnnnnnnnnnnnnnnnnnnnnnnnnnnnnnnnnnnnnnnnnnnnnnnnnnnnnnnnnnnnnnnnnnnnnnnnnnnnnnnnnnnnnnnnnnnnnnnnnnnnnnnnnnnnnnnnnnnnnnnnnnnnnnnnnnnnnnnnnnnnnnnnnnnnnnnnnnnnnnnnnnnnnnnnnnnnnnnnnnnnnnnnnnnnnnnnnnnnnnnnnnnnnnnnnnnnnnnnnnnnnnnnnnnnnnnnnnnnnnnnnnnnnnnnnnnnnnnnnnnnnnnnnnnnnnnnnnnnnnnnnnnnnnnnnnnnnnnnnnnnnnnnnnnnnnnnnnnnnnnnnnnnnnnnnnnnnnnnnnnnnnnnnnnnnnnnnnnnnnnnnnnnnnnnnnnnnnnnnnnnnnnnnnnnnnnnnnnnnnnnnnnnnnnnnnnnnnnnnnnnnnnnnnnnnnnnnnnnnnnnnnnnnnnnnnnnnnnnnnnnnnnnnnnnnnnnnnnnnnnnnnnnnnnnnnnnnnnnnnnnnnnnnnnnnnnnnnnnnnnnnnnnnnnnnnnnnnnnnnnnnnnnnnnnnnnnnnnnnnnnnnnnnnnnnnnnnnnnnnnnnnnnnnnnnnnnnnnnnnnnnnnnnnnnnnnnnnnnnnnnnnnnnnnnnnnnnnnnnnnnnnnnnnnnnnnnnnnnnnnnnnnnnnnnnnnnnnnnnnnnnnnnnnnnnnnnnnnnnnnnnnnnnnnnnnnnnnnnnnnnnnnnnnnnnnnnnnnnnnnnnnnnnnnnnnnnnnnnnnnnnnnnnnnnnnnnnnnnnnnnnnnnnnnnnnnnnnnnnnnnnnnnnnnnnnnnnnnnnnnnnnnnnnnnnnnnnnnnnnnnnnnnnnnnnnnnnnnnnnnnnnnnnnnnnnnnnnnnnnnnnnnnnnnnnnnnnnnnnnnnnnnnnnnnnnnnnnnnnnnnnnnnnnnnnnnnnnnnnnnnnnnnnnnnnnnnnnnnnnnnnnnnnnnnnnnnnnnnnnnnnnnnnnnnnnnnnnnnnnnnnnnnnnnnnnnnnnnnnnnnnnnnnnnnnnnnnnnnnnnnnnnnnnnnnnnnnnnnnnnnnnnnnnnnnnnnnnnnnnnnnnnnnnnnnnnnnnnnnnnnnnnnnnnnnnnnnnnnnnnnnnnnnnnnnnnnnnnnnnnnnnnnnnnnnnnnnnnnnnnnnnnnnnnnnnnnnnnnnnnnnnnnnnnnnnnnnnnnnnnnnnnnnnnnnnnnnnnnnnnnnnnnnnnnnnnnnnnnnnnnnnnnnnnnnnnnnnnnnnnnnnnnnnnnnnnnnnnnnnnnnnnnnnnnnnnnnnnnnnnnnnnnnnnnnnnnnnnnnnnnnnnnnnnnnnnnnnnnnnnnnnnnnnnnnnnnnnnnnnnnnnnnnnnnnnnnnnnnnnnnnnnnnnnnnnnnnnnnnnnnnnnnnnnnnnnnnnnnnnnnnnnnnnnnnnnnnnnnnnnnnnnnnnnnnnnnnnnnnnnnnnnnnnnnnnnnnnnnnnnnnnnnnnnnnnnnnnnnnnnnnnnnnnnnnnnnnnnnnnnnnnnnnnnnnnnnnnnnnnnnnnnnnnnnnnnnnnnnnnnnnnnnnnnnnnnnnnnnnnnnnnnnnnnnnnnnnnnnnnnnnnnnnnnnnnnnnnnnnnnnnnnnnnnnnnnnnnnnnnnnnnnnnnnnnnnnnnnnnnnnnnnnnnnnnnnnnnnnnnnnnnnnnnnnnnnnnnnnnnnnnnnnnnnnnnnnnnnnnnnnnnnnnnnnnnnnnnnnnnnnnnnnnnnnnnnnnnnnnnnnnnnnnnnnnnnnnnnnnnnnnnnnnnnnnnnnnnnnnnnnnnnnnnnnnnnnnnnnnnnnnnnnnnnnnnnnnnnnnnnnnnnnnnnnnnnnnnnnnnnnnnnnnnnnnnnnnnnnnnnnnnnnnnnnnnnnnnnnnnnnnnnnnnnnnnnnnnnnnnnnnnnnnnnnnnnnnnnnnnnnnnnnnnnnnnnnnnnnnnnnnnnnnnnnnnnnnnnnnnnnnnnnnnnnnnnnnnnnnnnnnnnnnnnnnnnnnnnnnnnnnnnnnnnnnnnnnnnnnnnnnnnnnnnnnnnnnnnnnnnnnnnnnnnnnnnnnnnnnnnnnnnnnnnnnnnnnnnnnnnnnnnnnnnnnnnnnnnnnnnnnnnnnnnnnnnnnnnnnnnnnnnnnnnnnnnnnnnnnnnnnnnnnnnnnnnnnnnnnnnnnnnnnnnnnnnnnnnnnnnnnnnnnnnnnnnnnnnnnnnnnnnnnnnnnnnnnnnnnnnnnnnnnnnnnnnnnnnnnnnnnnnnnnnnnnnnnnnnnnnnnnnnnnnnnnnnnnnnnnnnnnnnnnnnnnnnnnnnnnnnnnnnnnnnnnnnnnnnnnnnnnnnnnnnnnnnnnnnnnnnnnnnnnnnnnnnnnnnnnnnnnnnnnnnnnnnnnnnnnnnnnnnnnnnnnnnnnnnnnnnnnnnnnnnnnnnnnnnnnnnnnnnnnnnnnnnnnnnnnnnnnnnnnnnnnnnnnnnnnnnnnnnnnnnnnnnnnnnnnnnnnnnnnnnnnnnnnnnnnnnnnnnnnnnnnnnnnnnnnnnnnnnnnnnnnnnnnnnnnnnnnnnnnnnnnnnnnnnnnnnnnnnnnnnnnnnnnnnnnnnnnnnnnnnnnnnnnnnnnnnnnnnnnnnnnnnnnnnnnnnnnnnnnnnnnnnnnnnnnnnnnnnnnnnnnnnnnnnnnnnnnnnnnnnnnnnnnnnnnnnnnnnnnnnnnnnnnnnnnnnnnnnnnnnnnnnnnnnnnnnnnnnnnnnnnnnnnnnnnnnnnnnnnnnnnnnnnnnnnnnnnnnnnnnnnnnnnnnnnnnnnnnnnnnnnnnnnnnnnnnnnnnnnnnnnnnnnnnnnnnnnnnnnnnnnnnnnnnnnnnnnnnnnnnnnnnnnnnnnnnnnnnnnnnnnnnnnnnnnnnnnnnnnnnnnnnnnnnnnnnnnnnnnnnnnnnnnnnnnnnnnnnnnnnnnnnnnnnnnnnnnnnnnnnnnnnnnnnnnnnnnnnnnnnnnnnnnnnnnnnnnnnnnnnnnnnnnnnnnnnnnnnnnnnnnnnnnnnnnnnnnnnnnnnnnnnnnnnnnnnnnnnnnnnnnnnnnnnnnnnnnnnnnnnnnnnnnnnnnnnnnnnnnnnnnnnnnnnnnnnnnnnnnnnnnnnnnnnnnnnnnnnnnnnnnnnnnnnnnnnnnnnnnnnnnnnnnnnnnnnnnnnnnnnnnnnnnnnnnnnnnnnnnnnnnnnnnnnnnnnnnnnnnnnnnnnnnnnnnnnnnnnnnnnnnnnnnnnnnnnnnnnnnnnnnnnnnnnnnnnnnnnnnnnnnnnnnnnnnnnnnnnnnnnnnnnnnnnnnnnnnnnnnnnnnnnnnnnnnnnnnnnnnnnnnnnnnnnnnnnnnnnnnnnnnnnnnnnnnnnnnnnnnnnnnnnnnnnnnnnnnnnnnnnnnnnnnnnnnnnnnnnnnnnnnnnnnnnnnnnnnnnnnnnnnnnnnnnnnnnnnnnnnnnnnnnnnnnnnnnnnnnnnnnnnnnnnnnnnnnnnnnnnnnnnnnnnnnnnnnnnnnnnnnnnnnnnnnnnnnnnnnnnnnnnnnnnnnnnnnnnnnnnnnnnnnnnnnnnnnnnnnnnnnnnnnnnnnnnnnnnnnnnnnnnnnnnnnnnnnnnnnnnnnnnnnnnnnnnnnnnnnnnnnnnnnnnnnnnnnnnnnnnnnnnnnnnnnnnnnnnnnnnnnnnnnnnnnnnnnnnnnnnnnnnnnnnnnnnnnnnnnnnnnnnnnnnnnnnnnnnnnnnnnnnnnnnnnnnnnnnnnnnnnnnnnnnnnnnnnnnnnnnnnnnnnnnnnnnnnnnnnnnnnnnnnnnnnnnnnnnnnnnnnnnnnnnnnnnnnnnnnnnnnnnnnnnnnnnnnnnnnnnnnnnnnnnnnnnnnnnnnnnnnnnnnnnnnnnnnnnnnnnnnnnnnnnnnnnnnnnnnnnnnnnnnnnnnnnnnnnnnnnnnnnnnnnnnnnnnnnnnnnnnnnnnnnnnnnnnnnnnnnnnnnnnnnnnnnnnnnnnnnnnnnnnnnnnnnnnnnnnnnnnnnnnnnnnnnnnnnnnnnnnnnnnnnnnnnnnnnnnnnnnnnnnnnnnnnnnnnnnnnnnnnnnnnnnnnnnnnnnnnnnnnnnnnnnnnnnnnnnnnnnnnnnnnnnnnnnnnnnnnnnnnnnnnnnnnnnnnnnnnnnnnnnnnnnnnnnnnnnnnnnnnnnnnnnnnnnnnnnnnnnnnnnnnnnnnnnnnnnnnnnnnnnnnnnnnnnnnnnnnnnnnnnnnnnnnnnnnnnnnnnnnnnnnnnnnnnnnnnnnnnnnnnnnnnnnnnnnnnnnnnnnnnnnnnnnnnnnnnnnnnnnnnnnnnnnnnnnnnnnnnnnnnnnnnnnnnnnnnnnnnnnnnnnnnnnnnnnnnnnnnnnnnnnnnnnnnnnnnnnnnnnnnnnnnnnnnnnnnnnnnnnnnnnnnnnnnnnnnnnnnnnnnnnnnnnnnnnnnnnnnnnnnnnnnnnnnnnnnnnnnnnnnnnnnnnnnnnnnnnnnnnnnnnnnnnnnnnnnnnnnnnnnnnnnnnnnnnnnnnnnnnnnnnnnnnnnnnnnnnnnnnnnnnnnnnnnnnnnnnnnnnnnnnnnnnnnnnnnnnnnnnnnnnnnnnnnnnnnnnnnnnnnnnnnnnnnnnnnnnnnnnnnnnnnnnnnnnnnnnnnnnnnnnnnnnnnnnnnnnnnnnnnnnnnnnnnnnnnnnnnnnnnnnnnnnnnnnnnnnnnnnnnnnnnnnnnnnnnnnnnnnnnnnnnnnnnnnnnnnnnnnnnnnnnnnnnnnnnnnnnnnnnnnnnnnnnnnnnnnnnnnnnnnnnnnnnnnnnnnnnnnnnnnnnnnnnnnnnnnnnnnnnnnnnnnnnnnnnnnnnnnnnnnnnnnnnnnnnnnnnnnnnnnnnnnnnnnnnnnnnnnnnnnnnnnnnnnnnnnnnnnnnnnnnnnnnnnnnnnnnnnnnnnnnnnnnnnnnnnnnnnnnnnnnnnnnnnnnnnnnnnnnnnnnnnnnnnnnnnnnnnnnnnnnnnnnnnnnnnnnnnnnnnnnnnnnnnnnnnnnnnnnnnnnnnnnnnnnnnnnnnnnnnnnnnnnnnnnnnnnnnnnnnnnnnnnnnnnnnnnnnnnnnnnnnnnnnnnnnnnnnnnnnnnnnnnnnnnnnnnnnnnnnnnnnnnnnnnnnnnnnnnnnnnnnnnnnnnnnnnnnnnnnnnnnnnnnnnnnnnnnnnnnnnnnnnnnnnnnnnnnnnnnnnnnnnnnnnnnnnnnnnnnnnnnnnnnnnnnnnnnnnnnnnnnnnnnnnnnnnnnnnnnnnnnnnnnnnnnnnnnnnnnnnnnnnnnnnnnnnnnnnnnnnnnnnnnnnnnnnnnnnnnnnnnnnnnnnnnnnnnnnnnnnnnnnnnnnnnnnnnnnnnnnnnnnnnnnnnnnnnnnnnnnnnnnnnnnnnnnnnnnnnnnnnnnnnnnnnnnnnnnnnnnnnnnnnnnnnnnnnnnnnnnnnnnnnnnnnnnnnnnnnnnnnnnnnnnnnnnnnnnnnnnnnnnnnnnnnnnnnnnnnnnnnnnnnnnnnnnnnnnnnnnnnnnnnnnnnnnnnnnnnnnnnnnnnnnnnnnnnnnnnnnnnnnnnnnnnnnnnnnnnnnnnnnnnnnnnnnnnnnnnnnnnnnnnnnnnnnnnnnnnnnnnnnnnnnnnnnnnnnnnnnnnnnnnnnnnnnnnnnnnnnnnnnnnnnnnnnnnnnnnnnnnnnnnnnnnnnnnnnnnnnnnnnnnnnnnnnnnnnnnnnnnnnnnnnnnnnnnnnnnnnnnnnnnnnnnnnnnnnnnnnnnnnnnnnnnnnnnnnnnnnnnnnnnnnnnnnnnnnnnnnnnnnnnnnnnnnnnnnnnnnnnnnnnnnnnnnnnnnnnnnnnnnnnnnnnnnnnnnnnnnnnnnnnnnnnnnnnnnnnnnnnnnnnnnnnnnnnnnnnnnnnnnnnnnnnnnnnnnnnnnnnnnnnnnnnnnnnnnnnnnnnnnnnnnnnnnnnnnnnnnnnnnnnnnnnnnnnnnnnnnnnnnnnnnnnnnnnnnnnnnnnnnnnnnnnnnnnnnnnnnnnnnnnnnnnnnnnnnnnnnnnnnnnnnnnnnnnnnnnnnnnnnnnnnnnnnnnnnnnnnnnnnnnnnnnnnnnnnnnnnnnnnnnnnnnnnnnnnnnnnnnnnnnnnnnnnnnnnnnnnnnnnnnnnnnnnnnnnnnnnnnnnnnnnnnnnnnnnnnnnnnnnnnnnnnnnnnnnnnnnnnnnnnnnnnnnnnnnnnnnnnnnnnnnnnnnnnnnnnnnnnnnnnnnnnnnnnnnnnnnnnnnnnnnnnnnnnnnnnnnnnnnnnnnnnnnnnnnnnnnnnnnnnnnnnnnnnnnnnnnnnnnnnnnnnnnnnnnnnnnnnnnnnnnnnnnnnnnnnnnnnnnnnnnnnnnnnnnnnnnnnnnnnnnnnnnnnnnnnnnnnnnnnnnnnnnnnnnnnnnnnnnnnnnnnnnnnnnnnnnnnnnnnnnnnnnnnnnnnnnnnnnnnnnnnnnnnnnnnnnnnnnnnnnnnnnnnnnnnnnnnnnnnnnnnnnnnnnnnnnnnnnnnnnnnnnnnnnnnnnnnnnnnnnnnnnnnnnnnnnnnnnnnnnnnnnnnnnnnnnnnnnnnnnnnnnnnnnnnnnnnnnnnnnnnnnnnnnnnnnnnnnnnnnnnnnnnnnnnnnnnnnnnnnnnnnnnnnnnnnnnnnnnnnnnnnnnnnnnnnnnnnnnnnnnnnnnnnnnnnnnnnnnnnnnnnnnnnnnnnnnnnnnnnnnnnnnnnnnnnnnnnnnnnnnnnnnnnnnnnnnnnnnnnnnnnnnnnnnnnnnnnnnnnnnnnnnnnnnnnnnnnnnnnnnnnnnnnnnnnnnnnnnnnnnnnnnnnnnnnnnnnnnnnnnnnnnnnnnnnnnnnnnnnnnnnnnnnnnnnnnnnnnnnnnnnnnnnnnnnnnnnnnnnnnnnnnnnnnnnnnnnnnnnnnnnnnnnnnnnnnnnnnnnnnnnnnnnnnnnnnnnnnnnnnnnnnnnnnnnnnnnnnnnnnnnnnnnnnnnnnnnnnnnnnnnnnnnnnnnnnnnnnnnnnnnnnnnnnnnnnnnnnnnnnnnnnnnnnnnnnnnnnnnnnnnnnnnnnnnnnnnnnnnnnnnnnnnnnnnnnnnnnnnnnnnnnnnnnnnnnnnnnnnnnnnnnnnnnnnnnnnnnnnnnnnnnnnnnnnnnnnnnnnnnnnnnnnnnnnnnnnnnnnnnnnnnnnnnnnnnnnnnnnnnnnnnnnnnnnnnnnnnnnnnnnnnnnnnnnnnnnnnnnnnnnnnnnnnnnnnnnnnnnnnnnnnnnnnnnnnnnnnnnnnnnnnnnnnnnnnnnnnnnnnnnnnnnnnnnnnnnnnnnnnnnnnnnnnnnnnnnnnnnnnnnnnnnnnnnnnnnnnnnnnnnnnnnnnnnnnnnnnnnnnnnnnnnnnnnnnnnnnnnnnnnnnnnnnnnnnnnnnnnnnnnnnnnnnnnnnnnnnnnnnnnnnnnnnnnnnnnnnnnnnnnnnnnnnnnnnnnnnnnnnnnnnnnnnnnnnnnnnnnnnnnnnnnnnnnnnnnnnnnnnnnnnnnnnnnnnnnnnnnnnnnnnnnnnnnnnnnnnnnnnnnnnnnnnnnnnnnnnnnnnnnnnnnnnnnnnnnnnnnnnnnnnnnnnnnnnnnnnnnnnnnnnnnnnnnnnnnnnnnnnnnnnnnnnnnnnnnnnnnnnnnnnnnnnnnnnnnnnnnnnnnnnnnnnnnnnnnnnnnnnnnnnnnnnnnnnnnnnnnnnnnnnnnnnnnnnnnnnnnnnnnnnnnnnnnnnnnnnnnnnnnnnnnnnnnnnnnnnnnnnnnnnnnnnnnnnnnnnnnnnnnnnnnnnnnnnnnnnnnnnnnnnnnnnnnnnnnnnnnnnnnnnnnnnnnnnnnnnnnnnnnnnnnnnnnnnnnnnnnnnnnnnnnnnnnnnnnnnnnnnnnnnnnnntctttcaccaccgtcaccaccgcgtcgtgatccagcagttcgcgaatcacctgcacctgcggcaggatcaggcgtcccttgggcgcggcgaggtcgatgggagtcaccagcagcaccctgtccccggccttcaccaagtcacccgccagggggcgctcctccagcagatgggcgggcgccagcttgatcagcagttccttggcggcatcgatgttttcccccttgagggcggagacggagacccagggcagtccccgttcctcgcaccaggcgatattggcgggggcaggctcgcgcaaatccctgtggttaaagaccattaacagcggtatcttcatctcgcggatgcgtttcagggaggacagctcgctctccgcgaaggggcggccatcgttcacaaacacggctatgtccgtgcggtaaagtatcttataggtggcgagtacccgtttttcgcccagttcgccgctgtcgtccagtccagcggtgtcaaagaaggtcaccgggcccaggggcagaagttcatagcgtttgtccaccgggtctgtggtggtgcccggggtgctggaaacgatggctatctcctgtcctgccagggcgttgatcaaggacgattttccagcgttgcggttacccagcagggtgatgtttacgcgttctccgcggggtgtgctcatctatcttctcccaaaaagtcttgcggcttgcggccgctaatagcttttattatcagttctttcatgtttctttccttgtcggactggataccagcccatgtaaaaataatatatgtgaaaagcgcgaatctgtcaagcaaagagaattctggcagacaggggcctgtgtttttgatatatccacaaattacacaaattaacacggattaaaagaacagaataaggacaagtgtccagcctaaaaacaacaaccagaccctgaaacaaaccgccaccaagccctaaagccgtgtcatcccgggctgtcggggtcaccgccaaagcgcgaagcggtttggtggggtggcttgacccgggatccagtcttttaaaaacaaccagcaagccccgaaacaaagcacaacagactaaaaaccgtgtcatcccgggctgtcggggtccccgccaaagcgcgaagcggtttggtggggtggcttgacccgggatccagtcttttagaaacaaacgcgtaaggttttaaaaaagcaggcacctttccacctcaaaacacctttccacaaattctccccccatatatataggtgctacgaccccttcatgccaggcgggaagcggatcccagggcaagtatatatatacttgcccgtaattgcgcggccatgggctggctgccctccctttcccctcgcgcgcgggtggctctcatttgcatccagcgttttggcgtgagtcttccttaggtcatccttataatttataaggttgacctaaggatgatggcatcaaatccagtagcagcaaaggagggcggtatgaaggattatgcggaaggttgtggtatttttgtggaaaggtggaaaggtgcccccgaaacaagtccaccaagttatattttgtgtcatcacgggaagtcggggccccctctggggtggcttacccgtgatccagtctttttaaaagaaacatccacaaattacacaaattaacacgaattaaaagaacattaaagagtcaacacacccgactccggaacaaaaccctccagactaaaaaccgtgtcatcacagcctgcgagccgtgatccagtgcccaggtgtggcaaagtccgtttgccacagagaccggaggtctcttccaaacaggcaactccgttgcctctgccgaacggacttcggcaacccttatattacaccaatccgtgtcaatctgcgccctttatccgcgtttatctgcgtgaaccgtggaacccgggatccagtcttttggaatgtttgaacttcgctgaaaacatttttcgctaccaggaatgaaaactggacaacaaacgcagcttgggatatctgacactaagagtgtaattcacacgatcaataagaacatagcgtgctgtgcatacaaaacatattaccgacggacttctgttctgaaatatggacgttttgaacttggtaaacagtccgtatatggactaccagctgggacttgccattaggcatatgcccgaatgtaaagctatattcttatataacgcattgtagacagcacaggttgttctctgctctttccatattacactagtggtcatcatttcaccagtaggggtttttttacgcttttttcccgggagttttcatgtaaagcaccctactggacaaagagatgggagccggaaaacacagcctgaactgggacggcaccgactccaacggcgcccaactggcaagcggagtctatatctaccgcctcagcaccggaaagacgagcgccagccgcaaaatgatattgctgaagtgacggacagccgcccttccaagtccgataattaacttgaaccgccgcgcattacacacggcggttctttccaacaagccaagtatcagcagcgggaaaactgcgctgaaaaagccgctggtggggctccgtaaaatgggagtggaagccgccgcatggaacaccttgaaagtaacaagataccgccccaaattgatctttcctaacccaaaatccgcaaagcaaatttcttgacaatgatctttggcttaaatataaggttcctatcgaacaaaaggagcatgttatgtacaatcttctttgtgataattgggtaaacgtggtctatctttcgggcaaaccagatagaatatctttagttcaaactcttgaagacgcacactgtctgcaactggcatacagcaatcctatggaccggttcgctgttttcagattcctgcttgctcttggctactggtgtttcgccaacaccaacggggagcctgaacctgataagccgcttccgacctcctggatatcctggctggaagaaaacaaggggtatttcgagctttttggggatggacagagatttttccaagccgatcccagttccaggatcagagccattaccgaccttattcatgagataccaacagctcacaacctatgccatttcaatcatgtcaccgactatatcgatgggctctgcgaagcttgctgcatcaagggactgctgagattacctgtctttaccactgtcggtggcagagggataggcgcgggaatcaacaacactcctccattttacctgctctggcatgcaaatgacctcgctggcatgctggttcaaaattggcaaccctgggataatatggggattccggcatggttgggttcttttcaaaaagaaagcaggaaagtgggcttacttgccggaatgacctggctgccgcgcaaggtgcatctgcatgatcctgtctcaggtcaggcagcatgttgttcctgcggcttaccctccaaagctctcgtctattcctgcagcataaaacctgaaccagtgccggaaggccttaaatggaaagaccctcatggtgtttacaccgatcagggaaaaagtctccagtccaaaatcaaactgatgtccaatgatagatacactttcgcggaccgggattggtatagcccgttgttcagctatttgcacgcggaaggaaactccagacaaggaaaactatggttggttggatttgccagcgataaagcaaaaagcatagacatctgggacaagatcatcgagcttgagggaactgatacaaatgatgagctactggctcaattggcaaacagggctactgcccttaatgccatgcgcaagaagcctctcagaggtgatttcaaaaagtcagtgggcactccccagattgctgacattatcccccacgccgaaagcagaattgccatcaatgcgggtaaaatgactgagaacaggggctattcctggcaggatgccgatactgaatacggagaactgctcaccaaggttgcatgctctttggagccggctcaaacagtggacgccaggctcaagagaggtaaattcatttcccgcaagccctggccagttataccagaatccaaaacaaaacccgcagaggaggaccagaatgaatagaggaaccgttgacttcattgcaagcctggagaacctcaaagaaggcgatttgggcattcttagaaaactcaggggagcccggcttgatgaaaagcttcccggatttgacctgttttccgccctatggtggcctttgcggcaaaagaatcaacgcgctcccaagcgtgaagtggcttggttgatcgccaaactttttgctgaattccgctttgaacagcgcgagggagccacattgcccattcttatgggaggcatctgccggaagttggaacccaaaaaggaattaccccgggtattggcacgctttgatcaactcgcatcgcttgacattatgcagatggaagagccgctgtcggtcatcatgggtattttgcgcaagcaccagcaggtctgcctggactgggtagggcttactgatgttctgtcattttgggagcaggaacctgtcaaaagagaatggtcggattcatttattaaagcatacaagatcaacaaggaggattcagatgttgattgaaattcatatgattcagaatcacagcccggcaaatcttaaccgggacgacttgggcgcccccaagacctgttatttcggtggagtattacgttctcgcatctccagccagtgcatcaagcgcagcatccgttttgccccggaattcgcggaccttagaggaggtatccgaacaaggcgtctggcagagaaactcgaggaaatgctggaaaacaaagataagaagctggttgccaagtttcttgaagcctgcggaatcaaaaccaaatcttccaagaaagctgcaaaaaagtccgaaaagatacccgcggaagccgatgaagatcaggatgagcagcaggcggctgatacatctgacatgctggtttttaccacttatgatgccctgcgccaaatggcaaagctgctttccgactccaaactaagtgaaagcgaaaaactgctgcagttcaaagatctgctcacaaactgcgtccattctccggatatagcactttgcggcaggatgctggagaccaaagagcttaaaaacactggcgttgaaggcgccctacaggttgcacatgcgatctccacccacattgccagacctgagatagactattttgtggcggccgatgatgttcccggtgaagacgccggagcgggtcatattggcgaatccatgtttgcctcagcctgtttctacaaatacttctccattgattgggaacagttggtcaagaacctgaaaggggacacgaatctggcagcccacaccgtgggtgcctttctcctcgccgcagccaaaaccaaccccagtggcaaacagaacagcttcgccgctcataactatcccgatggcatccttgttgagttcaagaattcccctattagctacgccaacgcattcgtcaggccagtttccgtggtcaaggaatcggacctggtggaacaaagcatcggccagctttccaactacgtgaacgacatcaggcttggctattatgatgagcaatccccagttatcagcttctggttttctccaaacaatcgctattcccttggcaatgagcattccaaactggcttccagaaacattggcaacctcaatgagcttgtaggcgctgtgttggattatattggcggcttcaagtgggaagaagttcagaaaagcaaggcttatgttggcggctgacatgagtgcgccacccaacaccttattcttgcgcttggagggggctttgcagtcttggggcagcaacgaggctaagtttgctttgcgcaggactaccgacgctcccacaaaatcaggtgtcctggggctgctttgcgcggccatgggaattgggcgcgcggaggctgctgattcatggctcccaaaactcgccaacctgcgcatgggcgtgcggatagaccgccccggcatacgctggtgggacttccatactgttggagcgggacaaagaatgcgcatggcagagctgaaggcacccaaaaaaccttccatggttggagctgccctggctgataccctgacaccaagcaaagtaaaaaccagggcagagaccttgctctcacgccgcgaatatcttgccgacgccagttttctggtcgccttgcagggtgagccggaacttgtggaaaagctctccgccgctctggccaagccggtctgggcaatttatctggggcgcaaatcctgtcccccttcacgtcccgtgggcgagcatgctccgggcttttataacactttggaggaggcgctgtccgcggttcccctgcaaaagcgctggcacaatgaacccctgccgcaaatactgccttgcgtcatggactggatccccagccaggacggagaacatgcgcctgatgacgcggagattcattacgatctgccggtttcttttcagccgccccgccatttgccgcgcttcgtgatcaggcgtgagctggttgtgggagaggatgtgcaagtgagcagggaaaccggaaccagcgtttggaggcccaaaggaacccgggcggattataacaattccgagtataagaaggtcagggcggagcggcttgtgatggaccatgccgcgtgcatggtatgcaaagctcccgccacgactgttcaacacgtgaattaccgcagggcgggaggcaaggaaataccggaagacctgcgggcgctgtgccgcctctgccacgacgcctgcaccatgctggaatacggttccggcatgaccaccgaccgcatcgacccctgcgaccccatatggcgggagcgaatactggcaaagcgcaaagatatagtcgagttccgttcgcgcgggcagcgtttccgcaaaatgaagccagaggaggaaaacggatgatctacttgtccaagctattgatcgatactggaggcaatccagaccgtccccgccccggcagaaagtggctggacaatatctataacgtccaccgccgcctttccatggcgttcccttcaggtttgcgccgggagcaggatccgcatttcctgaagcccttttcgccaaacgacttccaaaaaactcccttccttttccgggtcgataacaacatcgacggaaacgataaaagggcgattattatcgtccagtccgttcttgagccggattgggattattgcttccaaaacgcgcttgatttcctggcagcgccaccggaaacaaaggagtataatccagagtttcaagcgggacaactgctccggttcaggctgcgggtaaacgccagcgtacgccgtcatattcctgagaaggtgcaacaggacggtcaaaccatagaaactggcaacatcctgcacaaaagggtttctctcacctgggatccctcttccaccccggatcaggcccttgccgactggctggctgccaaaagcccaaagctgggcttcacccttcagcgctgtgagcttcttcaactgggttgggtttatggctccaagcctgaacctaaaaatgtcaaagcaaaggaacagggacagggctactggcgtgaacacacatacaatcctctgcgcttccgttcggctctactggagggaattctcaaagtggatgacccgaaactgttcctggaaacgcttagaagcggcattggaaaagcgaaaagcttcggctttggcctgctgtccgttctgccaatcaggaatgatgaataaagacctgcactctatcccccggatcagagatcggcttagctatctctatgtggagcatgccaaaattgatcagaacgggcaagccatcgccattcacgatgccctgggagaaaccccggttccttgtgccggcttggctatgctgatgctgggaccgggcataaccatcacccatgcggcaatactttcactggctgcctgtggctgtctggtagcctgggtgggggaacatggcgtcaggttctatgccgcaggcacaggtacaacccgtagcgccgtcaatcttatgaaacaggcaaagtactgggcagacccggttttgcatttacgggttgtgcgctccatgtatcagttgaggttccaggatgagctttctcctgatttaactttgaaccagatcaggggcaaggaaggtgcccgggtgcgcgatacatatttccaactctcccaaaagtatggtgtgcccatgcagggcagaaactatcaaagagacaactggaataaagcggatcccataaaccgggcattatctgtggcaaactcctgcctctacggcatatcgcacgctgccattgttgctgcaggattctctcccggattgggctttgtccacactggcaagcaactgtcatttgtctatgatatcgcggatctatacaaaatggaaatggctgctcccgccgcattccgggcgaccgctgaagggatcggcgaactcgaccgcagagtcaggcttgcctgccgtgatgaattccacaggcagaatctactcaaacgcattgtcgcggatattagttctctcttcggtgatattatgccagaggatagcccggatgactgttttgccgaagaaccagccttgcctggaggactctggtctccagatggagaagtttccccaggcggcatatcttacgggcaggatgatctgccaaaggaagattgatggtggttttagtattggaaaatgtgccaagctccctgaggggtaagatcacacgttggctgctggaagtaaaagccggggtgtttgtgggtaaagtctcagcaatggttagagataaactgtgggataaggttagaagcaattgcagcggtggaacttgcctgatgatctggagtagtcagaccgagcaagggtttgatatcgaattctggggtgccgcatcaagagtcgttacggaatgggagggtatcaaacttatgaccaagcatccttaaactaaggcttgaaggagttcaatgacctcttagacctctattgatcaagtgtattccccatgcatgtgggggtgaaccgccacagatttacactcaggtaattgaaggcgtgtattccccatgcatgtgggggt
